United States Patent Application Publication US 2002/0132767 A1 - sequence listing, part 2

SEQ ID NO: 1629 - DNA, 13337 bp, Homo sapiens
  SITE (9965): n equals a,t,g, or c
cctggacagggctgcggtaggccagcggtgggctggcggttgcgctcctcagatcggcggcctttcgggcggtggcttgcgtttgagcctcagaaagcgaggagcggcctccacggaagccaagctggccgaggtaaccgagaagcggcttcccctatggcttcgaccctggagccgctggagcggcggcggccgcagggaggcagccattttccgtaggcggtggccgcggcgcttccgggccgcgcggctggagcctgaggcggggccaccgtcgggcacgagaaaccattctctccccgcttttcgcagctgtatcccagaggcgcggctgaagctcgctgggacactgcccgcttgcccagtgcccacgggcacgcctgtcgcagacacaggctgtggcgaatccgagtgctggcgggcagcagtgcctgcagctgcgcccgcagactctttcccgcctccgccggcatttccgtgtccggccgatgtcatgcggtcggttgagcctcagggctagcagcttctactgatgcaaaaacataggaagtgtctctttgcttctggaaccggggtgggcagcaaggagctggccacttctttgaataccggtggcatcctgggcagaatttcggtgccgtttctgctggctcacttcaggaaaagtgaggctcacggctctcctcagccccccttagaagtctaaatgacctttggagaaatacaaagtcagcagaaagtttcactttcatcgtcaccaactcctgttggagttgatatttcataaacatcagcgacagaaagaaaatacgacttgatattttgtaaataaaatatccttttttacaagttgatattttgtaaacagaggtcagctgtaattttctccagatcaagtaagcacagttaaaaattcatataggcctggcgcggtgtttgacgcctgtaatcccagcactttgggaggccaagatgggtggatcacgaggtcaggagatcgagaccaccctggccaagatggtgaaaccctgtctctactaaaaacacaaaaattagccgggcatggtggcacgcgcctgtaatcccagctagtcgggaggctgaggcaggagaatggcttcaaccggggaggtggaagttgcagtgagctgagatcacgccactgcactccagcctgggtgacagggcgagactccatctcaaaaaaaaaaacaaaattcgtataaatcatctgcatggcaccctttatgtgtgttgcaaagaatgatgagcatcttgttgcttacttgggagacattgtctgaaaataggctacttttttaccttctgtagtaccccctccccccactgtatctgggtttcacttacccgctgtcaactgccatccaaaaaatattaaatggaaaactccagaaataaacagttcataagttttaaataacttttttttttttttttggagatggaatctcgttttgctgccctggctggagtgccgtggcacagtctgagctcactgcagccttcacctcccgggttcaaacaattttcctgcctcagcctcctgggtagctgggactacaggcgcgcactaccacacctggctaatttttgtgtttacaataaagaaggtttcaccatgttggccaggctggtcttgaagtcctggtctcaggtgatccacccacgtcaggcctcccaaagtgctgggattacaggcatgagccacggcgcaccgccagttttaaataactcttactacagtgttttattgttaatctcttattgtacctaatttataaattaaggtatcatagctatgtatacatagagaaaatagtataatgcagttagatgctgttgggggttttaggtattcacagaatgtactggaacttaccccccttggagaagggatactactgtattttgatctcaccgtctcagctcttttgccagtattcctacaatggaaaatctaaaatgttgttttttaaggtgcctttatttttagtttttaaattagagacaaagtcttgctctaactcccaggctggagtgcagtgatgaggtcatggctcactgcaaccttgaattcctgggctcaggcgactctcccacctcagcctcctgagctagaactactggtgtgctctaccatcctggctattttttttttttttcttcaaattttgtgttttgtagagacggggtctcgctatgttgctcaggctggtctgaaactcctggctcaagtgatcctcccacctcggtctccaaaagtgctgggaatgcaggcatgagccactgcacctggcctaaaatatttttaaagtgaaggcttccatcttcacaagaggatgaagggtcataaaagttgtactccccttactagagacagactgggatgatctgttgaaatttaagagaatctcagaatgttttcctaatcttattttctcctattcttttcttatggggaagatgggataggaggcacaccagttaaatccttggaaaatcccaaaatacctttcagccagtgggtgccaattttcttacccaccaatctttcctaaattgttttcttttttataaaaaagacagttgtccactgacatttgtgtgttttgtgctgtgcttcagctgaataatagaaaaggagaaaaacaaagggcctgctagttgattttgaagggaagacaggacaccttttctgttcttctttctctcataagtcgcaagtgatgaggttcatgtgagtttcttattgatacatacttttctttttcttgtcctcagtgcttttaggaagaagatccttttattgcttttgtacaagaccagacaggatctcatttgttaaacgtggtaccaattgggtgtcttaacacaggagcagaacttcctagagcagaatgatgatggtagatctgaaagtggctgcgtacttggaccctcagatcagggctttgtgggagaccaaggggcctgcaagagagagctccggtcagagtaaaaaatctcctcaaatggactgtctcgatcctaagagctcttgctggcacttccggaatttcacctatgatgaagcaggtggaccccgtgaggctgtcagcaaacttcaagaattatgtcatctatggctgaagccagagatccactcaaaagagcagatactggaactgctggtgctggagcagttcctgactattctgcccagggagacacagacccagatgcagaagcaccatccacagagcattgaggaggctgtggctctggtagaacacttgcagagggaatctggtcaaacatggaatggggtgagaagaaagattcctgacatgtacagtgaaataggatgcaggtggatatagtagagatggtggcagttagttgagaaattagatggattaggtaggtcattgtttggttttttttttaaggacagttaaggtgggacttgaaactacaggcccacagaaaagttcacaggtttcagagattgtggtagatacttccctggccttagagaaagagagttgcttttgccctctttggagccagggtgaattgagggtgttgggcctagtctggcttggccaaggagacaggacttaagtacttagaaacagaataaaaggtaataaagagtcagggaggctggatgcagtggctcacacctgtaatctcagcactttaggaggctgaggcgggtagatcacctgaggtcaggagttcaagaccagcctggacagcatggtggaaccctctctctacaaaaataaacaaattagctgggcatgatgaccggtgcctgtaatcccggctatcctcgaggctgaggagggagaatcatttgaacctgggaggttgcagtgagccgagatcgcaccattgcactccagcctgggcaacacagcaagactccatctcacaaaaaaaaaaaaacaaaaaaaacaaaaaaaaaacgggccgggtgcagtgactcacacctgtaattccagcactttgagaggccaaggcagacagatcccctgagcccagcctgggcaacatggtgaaaccccgtctctacaaaaaacatgaaaattagccaggcatggtggcacacacctgtggtcccagttacttgggaggctgagtcaggagaatcacctgagcccaggaggtggaggttgcagtgagctgagatggcaccattgcactcccttgggtgacagagtgagaacctgtcaaaaaaaaaaaaaaaaggcagatccacaaggagaacacaggaaaacaaggacacttaaagaaaaggagaaattggccaggttcggtggctcatgcctatatttcgaacactttagggggtcgcggtgggaggactgcttgagaccagcctggggaacatagtgtgaccttgttgctatgaaaaaaaaaaagaaaataagccaggctgatggcacatgcctctagtcccagcttcacaagaggttgaggtgagagaattgcttgacccagaagtttgaggctacagtgagttattattgcagcattgtactctggcctgggcaacagagtgagaccttgtctcttaaaaaaaaaaatgttttaggccaggcgtggtggctcacatctgtgatctcagcactttgggaggctgaggcgggcggatcacaaggtcaggagttcaaaaccagcctgaccaacatgctgaaaccctgtctctactaaaaatacataaactagctgagcatggtggcgtgtgcccgtaatcccagctactcagaaggctgaggcaggagaatggcttgaactcgggaggcagaggctgcagtgagctgagattgcaccactgcactccagccagggcaactgagcgagactccatgtgaaaaaaaaaatgtttttaaaaattaggaaaaatccagcctgggcaacatggtgaagctcagtctctacaaaaaatacaaaaatcagctgggcatggtggcgtgtgcctgtagtcccagccactcgggaggctgaggtgggaggatcacctgagcctggggaggatgagactgcagtgagccatgattgtaccactgtaccccagcctgggtgacagagtgagacccccgtctcaaaacaaaacaaacaaacaaaaaaaacaactaggggaagactgcacaagaaaagaaaacatagaaaaaagggaaacaaagatttggaaaaaagaaaaatcccaacagaatagccaaggacaggaaatgcactgatgggtaatgtcctccctatagtagatgaaagtctctactgccttcccttaatgcttgttccttggctctgctgacaagttgggagccagggtatgaacttggtgggtggcgacacatctgctgacctcgggtctgctgggaagaatacagggcaggacctatgtttggtgtcagaatcatctggaggtaggttggagccactccccttttttctccattctatccccattctctgaaaaccttcgctggctatagggataatcaggctgacaggaaaacttttaaattcatttatttgaattttagagaaaactagaagacagaaaaccacaactgtgggattgaagtcaacagaaaaggcctgacaagacagtattagaatgagtggcctgcctggctgggcacaatggctcacacctataatcccagcactttgggaggctgaggtgggcagattacctgagtttgggagtttgagaccagcttgaccaacatgaagaaaccccgtctctactaaaaatgcaaaaattagccaggcgtggtggtgcatacctgtaatcccagctacttggaaggctgaggcaggagaatcacttgaacccaggaggcagaggtagcagtgagccgagattatgcctttgcaccccagcctgggcaacaagagcaaaactcatctcaaaaaaaaaaaaaaaaatgagtgggctgcccaaccctgccagtggcctgacctagaccgtatacagaggagtagaagctgctgtgttaaagggctggcaggcaccacagtttgtttcctttcaccctagttttctcatatttgtgtatagtcatttgtggagcattggtggcccagtatctctttaagcctttttttgtcattttttttagtgtcttatactacccacaatgtgggctgtacacctgtcgctctgcctccacccccacaaaccaaaagtaagttctgtggtaacaaggatgggaattatttctaggttgcagtccatgagctgggaaaggaggcagtgctcttgggagaaacagcagaggcctcaagtttcgggctgaagccaacagagtcccaaccagtgggcgtatcccaagatgaagaattttggaatacatacgagggtctgcaagaacagctcagcaggaatactcataaagagactgagcctgtgtatgagaggggtaaggagcttcatgataattttcttctcctgggagctgtgataatagtttattcacccaaaatgtcatgggcattttttgaataccctgctctgtggatttgtaaaaccagccttgatagcaactatgatgtccttccaggcagcagtagaaatgccaactgtggatgaaagtgggagtaggcctagagaacagaaatatctaaaccacagaactcttggtaataacagtgtgaactctgttccttagactagtggagaggaaggaaagaaatggagtgggaaggcttggggccacttcatccttgtaaaatacagaaggaattgagatcagatgggctgttagtggcagaatgtgaaaacagttgtgtaccaggaaaaacataataaaagacaaaaaacttcatctcctaccatacagtggagtccctgagtacttcattttaagatatctttaatttttgcctaactcagaaaaatatgagaggaaaaagggatttcccttttatttctctgatgaaaactgaggaaacatttagttggggaactagttctaggggctggtggatatttgattcttatttatgaagagactgcttcaggcatcacacacaccacacgtgtaaaggtgtcccatctgtacttaaaaagtcaggatcagtgttttagaaatgagctcaggatgtttatagataaaagagatttcttctggctcttttccccccacagctgtgcctactcaacagattctagcttttcctgagcaaacaaacaccaaagactggacagtgacacctgagcacgtcttgcctgagtcccaggtgagctgtgctttccagctgttgagggctacctttctctgctatgtatgattaatactgtccaggaggggttcagaggtgtgttagtcccgggtgttctctgggcaactgggtacctcccaggctgtgggctgacgccttttctcctttttttctgccttctcacttaaaaaaatcatgttcttttaattcctttatcgcctggccaattcatagccaggtggctaggctgcttctgtacagtggcaggttctgagctgaagtccattctcttctttagagcttgttgacatttgaagaagtggccatgtatttttcccaggaagaatgggagttattggatcccactcagaaggccctctacaatgatgtaatgcaggaaaactatgagactgtcatctctctaggtaaagattttcccttccctttatgtagttgagtactctattcttggcttactgagaaggaaccccagtgaggggtgtcttactgttccaggagctggttgattctcatctagatggtataggggagggtgtaggtagtgtatccagatcacctgtggagctttttccaaatgtacatgccgattgcttatcccacattgagtcctttatcctttccttctcttttccaccaaacttcctcttctgtgtcttacttatctcagtaaggggcacattcattatccagtggctcaaggcatacaaagtaacagttttcctttattctgatcttgtcatcataccccactgttaattcattagcaagttttcttagctttactttgacatatcctgactgcaacaatgtctcatcttcttgcactgttagcatcctggtgtaagccagtgtcatcttgaaccaggcatacatgcgtagctttttaacaggtgcgcctgcatctccttgtgcccttccacagtctgttttctatacagaagctagattgatcttttaaaaacctaatcagatcatgacatttcctttcctcaaaagcatgtggtcacttacattcagaaaaaaaagtctgatattaccagggctccaggacactctacagtctggttcctgctcatctgtctgccctcatttgctactgaagcccttgctcagtcctcaccagccacttagctagtctccttgctgttaattgaatttgtcaagttcatttttaccctcttgtttcattttatttggcacactgggcttcctgaatacttcattttcaaattgagtacatctaagttttgctcaactcagaaaaatgtatatcatgcaaggggaaaaaacgctatatatatatatctttttattaactttcctcttgaaaactgaggataatcatcttggggaaccggctctaggggctgggagacactttgatctaatttacaaaagaacccagtggttaccccttcacactcttaaaaaggtgttctatctttcccagaaagaatcaggaatttcctgtattttacaaaatgagttaaggatgatcatagaaccaagagaaatattcttttggctcttttccacccacaagctgtgcctgctcaacagattttaatctttcttgagcagacaaacaccaaagactggacagtggcacctgagctcttcttgcctcagtcccagttgagctgtgctttccagcagtgtagggctacgtgagcatgaccttatctgcctttccctgctgcccaagacccacactgcccagcatgtgccctgaggcatgttagccccagaggttctaccctggacaattaggcttggcccagagggaactgggtacctcctaggctgtttgctgatcccttggctccttttcttctgccttcgcccccgtgggcccccgcctttttttttcttaaatcgtattctgttaatttctttagcacctggcctaccatgcagttcatacgcagttaggctgcttctgcagtggcaagttcagagctgaagtccattctcttctttagagcttgttgacatttgaagaagtggccatatatttttctcaggaagaattggagttactggattacactcagaaggccctctacaatgatgtaatgcaggaaaactgtaagactgtcatttgtctaggtaaagattctcccttctttttgtgtagaagttgagcaatctgttctcagtttactgagaatgaacctctgtgagagggtctcagtgttccaggagctggttgattctcaactagatagtgtagcggagggtgtaggtggtgtatccagatcacctggggagcttttccagatgtacgtgctcattccttgtcctacgtggagatcttgatcccttccctttccctttccccaaaccttctccatcatgtttttcccatctcagtaaggggcatcagcattatccagttgctcagggcaaacaaagtactgtcatgtttttttttttttttttttttgagatggagcctcgctctgtcgcccaggctggagtgcagtggtgcgatctcagctcagtgcaagctctgcctcccgggttcatgccattctcctgcgtcagcctcccaagtagctgagactacaggtgcccgccaccatgcccagctaattttttttgtatttttttagtagagatagggtttcatcatgttaaccaggatggtctccatctcctgaccttgtgatccacctgccttggcctcccaaagtgccggaatnataggcgtgagccaccgtgcccagctagtactgtcatcttttcccatgatctggccatcataccccactgttaattcattagcaagttttcttagctctactttgacatatcctgactgcaaccatgtttcagccccttgcactgccagcatcctgatctaagccagtgtcatcttgaagcagatcaatgtcagtagctttctaacaggtccccctgccttcgctcttgtcctcccacagtctgttttctacacagaaccccaactgattttttgaaaacctgatcagatcgttgcatttccttgtttcagaagcctgtggttacttcctaaccatatttggagaaaaatctaaacttcttaccaaggcctcaggaccctccatggtctggctcctatggagttctttgcacatgtgtcctgctactggtgcgcttgtgcactcagtccttagccacactggttgtctttctgttacttgaactcgccaggctcatttctacttttcctttgccttgcatacttttctgccatgtgacaaaactcacttttaggtttctgctcaagtattactttctcaaagaggtgtcccacaagaccttatctaaaatagctttacaggagcagaatcttaaatactctttaccgtgatttaattttctttaaaacatttatcactccctgacattattttgtttattgattgattgtgccatccctctactgtaatgtaaagtccgtgaaatcaggggtcttcttcactactatatccctagccctcgagcagtgcctaacacaccatagccactcaatacatgtttgttgaatgaatgagtgagagagtttcataccttgtaatccgtaattagagaaacttcaccaagtgattttggtctatttcttctacctgcatatgaaccagtaatctataggaatggtagaaatctatcctagttgagggccagtggctaaggaataaaggctaaataaaaagtagctgtaattataatagtaatcacttgtgcttatgatactcaagtcagcgtccttcacattggctttgccatacctggtcttatccaggctgagtccttctgaagagttaataagaccagcttatattccctgcaacttctggagcttggttcccccttggttggatatagggtattgatggcaaaagagagagaacatgtactggattcccattccctatatccttttcattgatccaccgtagatttatttcttagtctctgctttgcatagctacctataagtataacatagtataaacgtgatacttaatcttggagtctatccatttaaccatttggagtaacaaattgtaaaatgtctttggtcatcctgaaacagtctgggattagtggaccagttcactgttaagttaccagtccttgacctcattttgtccatttgacagcattgtttgtgctccccaaacctaaagtgatctcctgtctagagcaaggggaagagccatgggttcaagtatccccggagtttaaggatagtgccggaaaatctcctacaggtaaatataccatgggaagtggagaaatgtgccttgatgtgaacttttgcaagggcttaacattttaagattttgttccttttttttttaatcattgaatttttctttttattcctgtgatttgcttgttctgggatacagatgtgtgattatgtttattccaacagggttaaagctcaaaaacgacactgaaaatcatcagcctgtgtctctttctgacttagaaatacaagcatcagcaggcgtcatatcaaaaaaggccaaagtaaaagttccccagaaaacagcaggcaaagaaaatcattttgatatgcacagagtgggaaaatggcaccaagattttccagtgaagaaaagaaagaaactttcaacctggaaacaagagctgctcaaacttatggatcgtcacaagaaagattgtgcaagagagaagccttttaaatgtcaggaatgtgggaaaaccttcagagttagctctgaccttattaagcaccaaagaattcacactgaagagaaaccctataaatgtcaacagtgtgataagaggtttagatggagttcagatcttaataagcacttaacaacacaccaaggaataaaaccatataaatgttcatggtgtgggaaaagcttcagtcaaaatacaaatttacatacacaccaaagaactcatacaggagaaaagcccttcacatgtcatgaatgtggaaaaaaattcagtcagaactcccaccttattaaacaccggagaacccacacaggtgagcagccatatacttgtagcatatgcaggagaaacttcagcaggcggtcaagccttcttagacaccagaaactccacctgtgaagagaagcttgtccagtgtcctcattctgaagacattcaccaaatggagcttggcactaaaatttatgtaaaagaaaaatcacaaaccttgaaaaattttacatcagaaaatgggataaacatacatttcacagaaaataatcaagacttgctctgcagccactcagtagtcttctgtggtcacagaagtaaacattgttggctttgtattgatctctccagtcatttttgaacacatccaatagaaacattggcagcatggtcttccaaaacaaaaagcagtaacatgcatgtttaattgcataccattctcttcacagtagcaggcttaccaatttccatagtctcatgaggccgaaatgaattacaatgtaaagtgttccaggaaccaaattggattttctttcttttgtcattggacacggtttgcaaagttggacatcacttgagttccttcttaaacttttcggcaacttctcttggatcctgttatcacagttttttactgtgatgaaatcttgttaaccaccactagggaatctccagatgaactattaatgcactgtcttatgcctctcattggtgatgtttggaaaatagaagacatctctaatggaatcatgggggaaacgggttggaatttgtagccatggaatatatattagatgtaaagaattttctgcaataaaagaaactagacttgttaatccctgccttgcaatgtcagtaggataaagcagctataaaaattagtacttgcccaaggcctgaaagagaattagtgggaattaagatcaacttctcagttttgtttgtttactttttaattggcttttctttgttgttaagaatgagagacttaatttccatgggagttggagtgtgtgtgctgcaggcaggatcctgtggctcatttggcatggagacctggacatgtagtcagcaggagacggttccctaaataaaagatt

SEQ ID NO: 1630 - DNA, 1024 bp, Homo sapiens
ttctcacagcattcagtttatgtcctattcttacccttgtgttactgatattcacgaaattgctcagtcctttcaagagattgcttaaggacaaagacttcttactcaactctgcaatattggctacacatagctgacttaataaatagtcccttgactggtataagctgacgttacaaaaactggtaattccgaaaccactcatactggacttattaaataatccctcaactggtacagactgacattacaaaaacggattaattcagagatcactgaacacccaaaacactcagattcttataactatgattcagtaaatatgtgtggaatgcctatcttaccaggtgactatgttaggcgctgcatgagatataagatgaaaacaaggttcccattttccagggaagaatactggagtggaaaacgcagaggataccacaacaggagagctatttccgattagcggccgccactgctgagctatgtgaccctgagcaagtcacttcttaggtctccgtttctctgtcaaggagagatagaaaaagaacctatttcacaggttcaaacctacctcaagaaaaaatagttgtggggaatgcgtcacgagacctagaaaacggtacaaaaccctcggggggccgctgtttctgacctagcgagtggcccgacccggacaaaatgcctcttcctcgaggaggcggcgacgagcccagcaacagctcgagcacggccggccgggccgcgggaagcccgagaacgcggcgcgcgcagctgggaggcgacccttacccggcgaggctcccgggaccaaacgccgcccgacagccacgcagaacagacgtggcagtgcgacgcctcccccactggggacacgagacagcgacagccacgcggtgagccggtacaaggccctctaggcttcagcgggtctggatactcggtggcattaacccttccctaccgccggggaagacagcagtttctctggcgaggaagtaggccgggctcaggcgccttagcc

SEQ ID NO: 1631 - DNA, 451 bp, Homo sapiens
tcattctgttcaatttaatgaaggcctatgatgtgtcaggcactgtcctatactctgaggacacaggagtggccaagagacaaaattgcatcccctcatggaacttgtattccagtgaacagtaagaagaatggttttgctttcctgctccttgctctaagacgggtatgagatagttttggtcaatgagttgtgagcattgtgagcctctggctgaagcttttcatttttttttttttatttttttttttatttttttgctggtacaaggccagtgctctcctttcctgccttaatcatggaaccacatacagagagagcagccatgaaatcaaagcagtccagaacactgagccactgcatggagggcggctattcccaagagtctccagacctatagtgaactttgtgagaacaagaaataaacatttgttctgttaaatcactgaga

SEQ ID NO: 1632 - DNA, 692 bp, Homo sapiens
gtcaccaaagagcttagtcaacttacttaaacacattgaaacttgtttttccttaagtcataaactggcataaaaatttcttggagaaataaactgactgcttcccaacagacctgaccattgtgcagtagctgattaattaaagagttactattcaaatgagctctgactatttttaaaagcaacaaccagggtttggatggaacttctttgagttggagatgcaaacgagatccaaggtgtgcattctgtctggtgtatatttctgatttgatgagaagcagaaagtgggggaatctgacaagccaaaatcagtttggttagactaaactgatttcgtttcttcaagtacatttttatgttgaaatttaggcacaacacattaatagaataaagacataaaataactaatcatcttgatagatgcagaaaatgcatttgacaaactccaacacccttttgtggtaaaaacaacaaactagcatagaagagaacttcctctacctgataaagagcatgtacaaataactcatggctaacataatacttaatgctgaaagactggtgctttcccttaagatcaagaacacaacaaagatgtccacccttgctacttctgttgaacattgtactggaggttctaaccagggcaataagatatgataaagaaataaaagacatcagattaaaaa

SEQ ID NO: 1633 - DNA, 692 bp, Homo sapiens
gtcaccaaagagcttagtcaacttacttaaacacactgaaacttgtttttccttaagtcataaactggcataaaaatttcttggagaaataaactgactgcttcccaacagacctgaccattgtgcagtagctgattaattaaagagttactattcaaatgagctctgactatttttaaaagcaacaaccagggtttggatggaacttctttgagttggagatgcaaacgagatccaaggtgtgcattctgtctggtgtatatttctgatttgatgagaagcagaaagtgggggaatctgacaagccaaaatcagtttggttagactaaactgatttcgtttcttcaagtacatttttatgttgaaatttaggcacaacacattaatagaataaagacataaaataactaatcatcttgatagatgcagaaaatgcatttgacaaactccaacacccttttgtggtaaaaacaacaaactagcatagaagagaacttcctctacctgataaagagcatgtacaaataactcatggctaacataatacttaatgctgaaagactggtgctttcccttaagatcaagaacacaacaaagatgtccacccttgctacttctgttgaacattgtactggaggttctaaccagggcaataagatatgataaagaaataaaagacatcagattaaaaa

SEQ ID NO: 1634 - DNA, 690 bp, Homo sapiens
gtcaccaaagagcttagtcaacttacttaaacacattgaaacttgtttttccttaagtcataaactggcataaaaatttcttggagaaataaactgactgcttcccaacagacctgaccattgtgcagtagctgattaattaaagagttactattcaaatgagctctgactatttttaaaagcaacaaccagggtttggatggaacttctttgagttggagatgcaaacgagatccaaggtgtgcattctgtctggtgtatatttctgatttgatgagaagcagaaagtgggggaatctgacaagccaaaatcagtttggttagactaaactgatttcgtttcttcaagtacatttttatgttgaaatttaggcacaacacattaatagaataaagacataaaataactaatcatcttgatagatgcagaaaatgcatttgacaaactccaacaccctttgtggtaaaaacaacaaactagcatagaagagaacttcctctacctgataaagagcatgtacaaataactcatggctaacataatacttaatgctgaaagactggtgctttcccttaagatcaagaacacaacaaagatgtccacccttgctacttctgttgaacattgtactggaggttctaaccagggcaataagatatgataaagaaattttttaatcagattaaaaa

SEQ ID NO: 1635 - DNA, 692 bp, Homo sapiens; identical to SEQ ID NO: 1632

SEQ ID NO: 1636 - DNA, 692 bp, Homo sapiens; identical to SEQ ID NO: 1632

SEQ ID NO: 1637 - DNA, 692 bp, Homo sapiens; identical to SEQ ID NO: 1632

SEQ ID NO: 1638 - DNA, 281 bp, Homo sapiens
catgcctgtaatcctagcactttgggaggccgaggcaggcggatcacgaggtcaggagatcaagaccatcctggctaatatggtgaaacccggtctctactaaaaatacaaaaaattagctaggcatggtggcaggcacctgtagtcccagctactcgggaggctgaggcatgagaatggcacgaacccaggaggtggagcttgcagtgagccgagatcgtgccactgcactccagtctgggcgacagagcaagactccatctcaaaaaaaaaaaaaaaaa

SEQ ID NO: 1639 - DNA, 281 bp, Homo sapiens; identical to SEQ ID NO: 1638

SEQ ID NO: 1640 - DNA, 281 bp, Homo sapiens; identical to SEQ ID NO: 1638

SEQ ID NO: 1641 - DNA, 1128 bp, Homo sapiens
  SITE (785): n equals a,t,g, or c
agcctcggctcccaaccgggagcggcctccgtggccgggccgcaggcactcaccgtcgttctcgtcgctgtgccgccgccgcgacatgctgccctccggtgcgccgcggaaccgagaggccaggcggtaagcgctgcaggaactgtctggccgctggccgacgcaaggacagctgcaaggcgcgcggatgggccggcacgcaggcgcactagctcgccacggccccggaagcgcaggagaggccgccgggtggggctaggcgctgcgacagccggcgtgaggaagctcagtgggctacgaacgtctggcacacatgcaaccgccccctcgggctgcctccgcctgccggctacttctttctcccgccttccgctctatgtccttccggggccacgcagaaagtgccgccgctttggccactcagagcccccgggccgcggtcgtcgtacgcctgaaggcgggtcgtgccggcggccgctctagtctccgcctccgctcaggccggtcctccggggcttctcaatggtttcccggtggcctctcaatggttttcccggcggcccttgcgccgacgccaggagacttccggagcttggtgacgtcacgagcgagcttttctacccaaatacgcggcgggggaataggctcgagggcggtgagcagtgacaattgctaggcggagacagtgcagggaagagagaccttagaaaggatcaggactggcgggtatgtgctcatctactcccactttccggcttttgccgccctgggaaaagtgagagaanaggttgggccaagctcggcatgcggggtggggcctgggcgggaggcggtgccgcacgttccgccccttggtatggaaagccgggccctgacgcgagcgtgcggctccgggcttgccgactggccgtcattttccttaagttgtttgcttaggaaggaacaaatgattgttttagtaatctgttttcaagggttattgggtacctatatgcctgtgtgtgagcgtcccctcccctgatgtctttatgagcaccatactggcttatctgctttgtccatggccatctgaaatttcactctcccggcctaattctccttcggtcttacccatttcagtaaatgacg

SEQ ID NO: 1642 - DNA, 263 bp, Homo sapiens
ccaaaaatttagagtctttcttagctcttttccctctttttacataacaattatctgtaaaccctgcctgctctgctttcaacacaaatccagaatcagatcgtgttactgctttgtttaaaagtctcctatgacggccgggcggggtagctaacgcttgtaatcctaacacttatgggaggccgacgcgggcggatccgcttgagcctaggagttcaagacccacctgggcaacaaggcgaacaccgtctttacaggaaaaa

SEQ ID NO: 1643 - DNA, 2074 bp, Homo sapiens
gtaaaatatatattagagtatatatttatataaaacttataataaacaaacttatataatatataaatataaatttataatatataaatataaatttatataatatataaatatatataatacattctattatagtttatatatatacacacactctatatatagagagtcaagcatacggaaagtcagggcagtgactgacagcagctgacaattgtccagaaatgctcagatgcatctatttaattctgactgtaataattcctaccctattttaaaatagccttctataatccttaagcttctaagatttattttttaaaaaatagatttttaactaaaaggaaagcatccaaaataatctgattcagatcactgtgtagggtaaactccagcgatcgttatccaaattgtggcaactgacaaaaatttcagatttgctgtattatcaaacatgaattgtatctgcctctcccacactaaaatatcaaccataaaaacctttgcttaatgaatgctttgttttacttgtcttatttactctgaggttctcgcggcaagacccaaatggacagtgatttggctgccagctggtgttaaaaacaagccaactccaagaaagttatgtaagtctcccaataaccaaagcaaaagttatttttctacatattagcattccaattctctaggatgccctacaatgacatttcctctctctttagggattacctctaagtgagaaaaaggaagcattagaacaacaaagaaaagaacaaaagactcaagttctccagcccccaagtaatgacttgagaagtatattagtttttgactagtcaattacaaagcatatgaaaattgtattatcggcgggcgcagtagctcacatctgtaatcccggcactttggaaggccgaggcgggtggatcacctgagctcaggagttcaagatcagcctgggcaacgtggcgaaaccccgtctctacaaaaaatacaaaaacaaaaaaaaaattagccgggcgtggtggcccgcgcctgtggtcccagttacttaggaggctgaggtgggaggatcacttgagcctgagaggcggaggttgcagtaagccgagatcgcgccactgcactccagcctgacaaagaatgacactccgtctcagaaaaaaaaaaaaaagggagggaattgtattttctgtgccttgtacagaggttacacaagaaacctcgtgttagaaatcaaagcacgcagcatagttatttaatttatacctgtgtagtgaagagagccccggactggattcgctcttgctggtgtttgggaactgacagctgtccctccatcttagttatgctcagtctctagacccttaggtgtcagatagaaagctggactagaatatcctctcaagccattccttcgtagaaatctggtgtttcactattaaaactaaatgcatgcgattctgcctccacctcaactgccacaacactcaaggagagacaaacgttagtagataaaatttactcaatttaaaatgtctgttatgggtttttttcttacattgacagcatctgctaacgtttaccgcctcttaagcgttggcaaatgataaaacatcattgttgctgatgtgtattacctcatttaaccttcacaaaaaccagaagatataaatatcattacttctgtattacagactaaagtttaaggagatttcataacctggacaagatcaccaagtaaatggtagggtctggctttgaacctaaaccctctggttccaaagtctcatctcttaaccactactatacactctcttcaaaaaacaatacactaaaatgttaacaatagaattactctaagttttacttttttggtgtgtggatttgtgtttttgaccgattgtaaggcttatgtgtaatataagcatcttttttttgttgttgttaaaactagaattattccatctttatgaaggcaacactgatctccacgagcacaatcatccaaacggagatgggaacccctgttctaactctctcagaggcctgaagttagttttctagcactctc

SEQ ID NO: 1644 - DNA, 1703 bp, Homo sapiens
cagagtttgctgtcatcgtggaggtccacgcagccgcacgttccaccctccaccctgtggggtgtgaggatgaccagtctctcagcaagtacgagtttgtggtgaccagtgggagccctgtagctgcagaccgaggtgggtgcccccaggcagagtgtcctttttgtgagaagatgcccccgccccgcgctaacgcctgcccttgctctgcccctgcccttctccccagtgggccccaccatcctgaataagattgaagcggctctgaccaaccagaacctgtctgtggatgtggtggaccagtgcctcgtctgcctcaaggaggagtggatgaagtaagcaacagtgtgggtgaggcccctttgcttgcgaccctggagaaaacctggagctgtttccaaaagaggagctgggccgtggccactgagggaggagccgagagaagaggttgggggcggggttccaactccacgtccgccactgcaaagctcaggtggcctcgggaggcggtcatcatgtctgcctccggctcctgcatggggaggtgggggtggcgcctgccttggagagcgactgaggcttgggcaagggctccaagctcacaggagggttcataatggaagctctgtcatctgctgtgcaattaacttcaaaacctaaaagcccagtaacccatgccccaccccgctttttattttattttatttttattttttattttttttgagtcagagtttggctcttgttgcccaggctggagtgcaatggcatgatcttggctcaccacaacctccgcctcccgggttcaagcgattcttctgcctcagcctctggagtagctgggattacaggcacccaccaccatgcctggctaatatttgtatttttagtagagacagggttttagcatgttggccaggctggtcttgaactcctgacttcgtgatccgcccaccttggcctcccaaagtgctgggattacaggcgtgagccactgcacctggccccccgggtttttttttttgtaagcaaatttactttatttcctcctgcctcgattcttggtaattttttgggtcaaatttattaatcaaacattgtcctgatttaaaatcatgcagtgaagcttaggagcaaccagtgtcttccacgagtttaaggaaggtttttctttcttcttggcgtcttgacaacagcttgagggagggtgtgggaagcgcacaggccccatacccatacccgacagagggccgagcccagccccgacagcttcccttccttgctgggacacagctcctttcagcagttcaggggccaagcctgctgccccaagggtgtggattccagctctgcctgcacagctcctgctggtgccaaagccgtgtcacccctggttggccccgtgaccagggctcgagggattgtgctgtggtgtctgagtgttttgttttggttttcttcagcaaagtgaaggtgctttttaagttcaccaaggtggacagtcgacccaaagaggacacacagaagctgctgagcatcctgggtgcgtccgaggaggacaatgtcaagctgctgaagttctggatgactggcctgagcaagacctacaagtcacacctcatgtccacggtccgcagccccacagcctcggagtctcggaactgacccgtcacacacacctgcctaaagacagggatggctgt

SEQ ID NO: 1645 - DNA, 1712 bp, Homo sapiens
  SITE (66): n equals a,t,g, or c
  SITE (153): n equals a,t,g, or c
  SITE (241): n equals a,t,g, or c
  SITE (288): n equals a,t,g, or c
  SITE (668): n equals a,t,g, or c
  SITE (1205): n equals a,t,g, or c
  SITE (1206): n equals a,t,g, or c
  SITE (1254): n equals a,t,g, or c
  SITE (1558): n equals a,t,g, or c
cagagtttgctgtcatcgtggaggtccacgcagccgcacgttccaccctccaccctgtggggtgtngaggatgaccagtctctcagcaagtacgagtttgtggtgaccagtgggagccctgtagctgcagaccgaggtgggtgcccccaggcnagagtgtcctttttgtgagaagatgcccccgccccgcgctgacgcctgcccttgctctgcccctgcccttctccccagtgggccccanccatcctgaataagattgaagcggctctgaccaaccagaacctgtcntgtggatgtggtggaccagtgcctcgtctgcctcaaggaggagtggatgaagtaagcaacagtgtgggtgaggcccctttgcttgcgaccctggagaaaacctggagctgtttccaaaagaggagctgggccgtggccactgagggaggagccgagagaagaggttgggggcggggttccaactccacgtccgccactgcaaagctcaggtggcctcgggaggcggtcatcatgtctgcctccggctcctgcatggggaggtgggggtggcgcctgccttggagagcgactgaggcttgggcaagggctccaagctcacaggagggttcataatggaagctctgtcatctgctgtgcaattaacttcaaaacctaaaagncccagtaacccatgccccaccccgctttttattttattttatttttattttttattttttttgagtcagagtttggctcttgttgcccaggctggagtgcaatggcatgatcttggctcaccacaacctccgcctcccgggttcaagcgattcttctgcctcagcctctggagtagctgggattacaggcacccaccaccatgcctggctaatatttgtatttttagtagagacagggttttagcatgttggccaggctggtcttgaactcctgacttcgtgatccgcccaccttggcctcccaaagtgctgggattacaggcgtgagccactgcacctggccccccgggtttttttttttgtaagcaaatttactttatttcctcctgcctcgattcttggtaattttttgggtcaaatttattaatcaaacattgtcctgatttaaaatcatgcagtgaagcttaggagcaaccagtgtcttccacgagtttaaggaaggtttttctttcttcttggcgtcttgacaacagcttnngagggagggtgtgggaagcgcacaggccccatacccatacccgacagnagggccgagcccagccccgacagcttcccttccttgctgggacacagctcctttcagcagttcaggggccaagcctgctgccccaagggtgtggattccagctctgcctgcacagctcctgctggtgccaaagccgtgtcacccctggttggccccgtgaccagggctcgagggattgtgctgtggtgtctgagtgttttgttttggttttcttcagcaaagtgaaggtgctttttaagttcaccaaggtggacagtcgacccaaagaggacacacagaagctgctgagcatcctgggtgcgtnccgaggaggacaatgtcaagctgctgaagttctggatgactggcctgagcaagacctacaagtcacacctcatgtccacggtccgcagccccacagcctcggagtctcggaactgacccgtcacacacacctgcctaaagacagggatggctgt

SEQ ID NO: 1646 - DNA, 315 bp, Homo sapiens
  SITE (43): n equals a,t,g, or c
  SITE (45): n equals a,t,g, or c
  SITE (213): n equals a,t,g, or c
gctcggccctgtcaggtttggggcctgtgtgcttcccagactncntccctccagccgttggaatcgctgaagatggcaatgaaaggcggagggatgatgggctctctctgtgttcaaactccttggagagacgactaggaggacagcttgcctcccaggccccttgtggacttagactcaaaacccgcaggagaaacaggtccgactcagtantgcagtcgcaataacatgtctgctcccgaggttaacattcaagcgtttctactttgaaattcagcaagagtttctgggccttatgtttgagggtaccttttg

SEQ ID NO: 1647 - DNA, 9331 bp, Homo sapiens
  SITE (169): n equals a,t,g, or c
  SITE (269): n equals a,t,g, or c
  SITE (425): n equals a,t,g, or c
  SITE (606): n equals a,t,g, or c
  SITE (609): n equals a,t,g, or c
  SITE (643): n equals a,t,g, or c
  SITE (647): n equals a,t,g, or c
  SITE (651): n equals a,t,g, or c
  SITE (702): n equals a,t,g, or c
  SITE (707): n equals a,t,g, or c
  SITE (710): n equals a,t,g, or c
  SITE (761): n equals a,t,g, or c
  SITE (784): n equals a,t,g, or c
  SITE (868): n equals a,t,g, or c
  SITE (920): n equals a,t,g, or c
  SITE (958): n equals a,t,g, or c
  SITE (1254): n equals a,t,g, or c
  SITE (1320): n equals a,t,g, or c
  SITE (1461): n equals a,t,g, or c
  SITE (1465): n equals a,t,g, or c
  SITE (1469): n equals a,t,g, or c
  SITE (1471): n equals a,t,g, or c
  SITE (1628): n equals a,t,g, or c
  SITE (1630): n equals a,t,g, or c
  SITE (1687): n equals a,t,g, or c
  SITE (1714): n equals a,t,g, or c
  SITE (1716): n equals a,t,g, or c
  SITE (1719): n equals a,t,g, or c
  SITE (1729): n equals a,t,g, or c
  SITE (1732): n equals a,t,g, or c
  SITE (1737): n equals a,t,g, or c
  SITE (1738): n equals a,t,g, or c
  SITE (1741): n equals a,t,g, or c
  SITE (1850): n equals a,t,g, or c
  SITE (1858): n equals a,t,g, or c
  SITE (1968): n equals a,t,g, or c
  SITE (2020): n equals a,t,g, or c
  SITE (2063): n equals a,t,g, or c
  SITE (2160): n equals a,t,g, or c
  SITE (2279): n equals a,t,g, or c
  SITE (2422): n equals a,t,g, or c
  SITE (2576): n equals a,t,g, or c
  SITE (2587): n equals a,t,g, or c
  SITE (2663): n equals a,t,g, or c
  SITE (2665): n equals a,t,g, or c
  SITE (2712): n equals a,t,g, or c
  SITE (2776): n equals a,t,g, or c
  SITE (2903): n equals a,t,g, or c
  SITE (2939): n equals a,t,g, or c
  SITE (2990): n equals a,t,g, or c
  SITE (3140): n equals a,t,g, or c
  SITE (3195): n equals a,t,g, or c
  SITE (3409): n equals a,t,g, or c
  SITE (3585): n equals a,t,g, or c
  SITE (4045): n equals a,t,g, or c
  SITE (4078): n equals a,t,g, or c
  SITE (4094): n equals a,t,g, or c
  SITE (4177): n equals a,t,g, or c
  SITE (4198): n equals a,t,g, or c
  SITE (4200): n equals a,t,g, or c
  SITE (4284): n equals a,t,g, or c
  SITE (4292): n equals a,t,g, or c
  SITE (4337): n equals a,t,g, or c
  SITE (4501): n equals a,t,g, or c
  SITE (4560): n equals a,t,g, or c
  SITE (4589): n equals a,t,g, or c
  SITE (4626): n equals a,t,g, or c
  SITE (4690): n equals a,t,g, or c
  SITE (4850): n equals a,t,g, or c
  SITE (4862): n equals a,t,g, or c
  SITE (5100): n equals a,t,g, or c
  SITE (5128): n equals a,t,g, or c
  SITE (5280): n equals a,t,g, or c
  SITE (5306): n equals a,t,g, or c
  SITE (5331): n equals a,t,g, or c
  SITE (5582): n equals a,t,g, or c
  SITE (5711): n equals a,t,g, or c
  SITE (5742): n equals a,t,g, or c
  SITE (5849): n equals a,t,g, or c
  SITE (6106): n equals a,t,g, or c
  SITE (6181): n equals a,t,g, or c
  SITE (6269): n equals a,t,g, or c
  SITE (6336): n equals a,t,g, or c
  SITE (6368): n equals a,t,g, or c
  SITE (6435): n equals a,t,g, or c
  SITE (6469): n equals a,t,g, or c
  SITE (7020): n equals a,t,g, or c
  SITE (7052): n equals a,t,g, or c
  SITE (7065): n equals a,t,g, or c
  SITE (7105): n equals a,t,g, or c
  SITE (7260): n equals a,t,g, or c
  SITE (7295): n equals a,t,g, or c
  SITE (7374): n equals a,t,g, or c
  SITE (7389): n equals a,t,g, or c
  SITE (7418): n equals a,t,g, or c
  SITE (7528): n equals a,t,g, or c
  SITE (7653): n equals a,t,g, or c
  SITE (7680): n equals a,t,g, or c
  SITE (7809): n equals a,t,g, or c
  SITE (7811): n equals a,t,g, or c
  SITE (7815): n equals a,t,g, or c
  SITE (7860): n equals a,t,g, or c
  SITE (7910): n equals a,t,g, or c
  SITE (8184): n equals a,t,g, or c
  SITE (8280): n equals a,t,g, or c
  SITE (8543): n equals a,t,g, or c
  SITE (8552): n equals a,t,g, or c
  SITE (8695): n equals a,t,g, or c
  SITE (8788): n equals a,t,g, or c
  SITE (9060): n equals a,t,g, or c
  SITE (9154): n equals a,t,g, or c
  SITE (9160): n equals a,t,g, or c
  SITE (9165): n equals a,t,g, or c
  SITE (9195): n equals a,t,g, or c
  SITE (9251): n equals a,t,g, or c
cagccatgataaagagacctccattaaatacgtcagccaccagcaccccagccacccccagctcttcagcattgtccgccaggcctgtgtccggagcctgagctgtgaggtgagccttgtggccacagagcctgtctctgtgggagcccacatgctcccaggtgctctngggtgggctcggagccagcattgcacagggaggcaggcactggtcctctctcagggcggacccgcagatcagcacagcacagggtacaggacgcctcccnttgtccagaattgcgggaggagtcatgttggacttgctgagcattttctgattgagtgctagcttttgcactttaagcaccgaacttttattatttgtcctttctttattattattgttttcttttttccttcttttgtgtcagggtctcgctctngtcgtccagactggagtgcagtggtgccgtcatggttcactgcaacctcaaactcctgggctcaagcgatcctcccgccttagcctcccaggtggctgggaccactggtgtgtgccaccatgctcaactggggtttgttttttgttgttgttaagacagagtctcactcggttgcccaggnctnggagtgcagtggtgcaatctcggcttactgcaancctnccanccctgggtttaagtgattcttctgtctcagctatcctgagtagctgggacnaacanggncgtgtgccaccatgcccggctaattttttgtatttttagtagagaagagantttcaccatgttggccgagctgngtcttgaactcctgaccttgtgatttgcccgcctcggcctcccgaagtgctgggattacaggtgggagccactgtgccccaccntttttaaaatttttttgtagagatgaggtctcagtatgttgcccaggttggntctcgaactcaagcaatcctctggctcatcctcccaanagcactaggattacaggtgtgagccgccatgcccagccatgtgtgtctattcttgatggatgtattcctaagataggaagcatttctaggttaggtggttcattgcatcaacatcacctttttttattatctcagtcctcattccaagtctcagtgatgatcccgtgctgctctcagcctgctgaggtgtggatgatttcttcctaaactacgtcgctgctgctgttgctcttgactctgagctcaggtctttgttacaaagaattcgtcgttcagttactaaacttccttgtcanttggtgtccacccagttcgacacaccaagctcccttactgttctcattcagtgtggctgtgtgccntgccctcaactgtcctctccttttaatttcctaccgctggtctgctagcaggcagctcggcatgtctgttagaattgtgtgttaaggaagagtaagtatgtaatgaggagggactgaaatcctcttataagaataaagtancgtngggngnctgggcatggtggcccactcctgtaatcccagccctttgggaggccaaggccggcagatcacctgaggtcaggagttcgagaccagcctggccaacatggtgaaaccccctctctaaaaaaaatacaaaaaaattagccaggcgtggtggcacactncnttacaatcccagctactcaggaggctgaggcaggagaattgcttgaacccaggagancggaggttgcagtgggccaggatcacnanccnactgcattcncangcctnnggngtgacaagagcgagactccatctcaaataaagaaagaaagaaagaataaaatgtgcggatttcagtgcagggagagtgcagtggctgctctgacctgctggttcttctngcatgctnccaggtgagtaagctggtacatttgagtctgggagaggtgtgacatatgcatgggagttatttatggctcaaggtggaagaaaagcaataagccttgttaccggcccttngcagtccacaatgacaagtgttgttggaagcttgatcacaggagcagaagangtacagtcttcggctctcatggcccccactgtgccactctccnccgttattaacgctggctgatttgtgccagctgactctgaaaagtctgaagaagaggctttgatttggtgtcactaagcgaggaaagggctgtctgnagtcgccggtgtccctccaggtctgccctggccgtgaaggccccatcttcttcggagatgagcagcacggctttgtgttcagccacaccttcttcatcaaggacagcctggccaggggncttccagcgctggtacagcatcatcaccatcatgatggaccggatctacctcatcaactcctggcccttcctgctggggaaggtccggggaatcatcgatgagctccagggcaaggcgctcaaggtgaattcagagatgaggntgccggggcggcagggggccctgcactgcatgagccgctctgtgctgaggttgaggcctggagaccgcgtggcgtcttcccctctgcttacagccagtgcactgtgtgaattgtagtctcttggcttcagagctggaggtcgtgaggagcctcnccaggccatcnccgcctgctttgctggtctctcttgtgcccgttgtcctggttctcgctcagctctggtttctttgctgcagtcagnancccctggtgtctttgtttcctctggccttcatctcagggatgtctgnttaatcccattgagttgcaccaccgaatgtaggcctccagctgtggagatgcagctcaggccanggccaggccaggtcgtgctctggtaacagcctcggatctcagcaccttcaagccatagggcctgtttcttactcatggtgtgtgcattgcaggagagtggggctctgcttgctgtggtcgtcctggncaggcagagcggcagccatatgaaaatgcttccccntaggctgggcgcagtggctcacgcctgtaatcccagcactttgggaggccnaaggcgggcagatcacctgaggtcgggagtttgagaccagcttgaccaacatggagaaaccccgtctcttccagaaatacaaaattagctgggcatggtggtgcatgcctgtaatcccagctacttgggaggctgaggcaggagaaacgncttgaacccatgaggcagaggttgtagtgagccgagatcacaccattgcactccnagcctgggcgacagagtgagactccatctcaaaaaaaaaaagaaaggaaaaaatgttgctccttctgccctccagaagcacagatggtgctgagggccttgtttgtctcagctcattgaccagagccagtcacgtgtgccttagccaagtagtgcacccagaaggggaggtggagacaggtggggagcagcgcagatggccactcacgagaatnccccctgggtgccttgggtcactcattaggaaggggacaggagaagctcaaccgatttctgttctcggatagctcctgatgtagccggggcagagctatgctgttgggaatgattggactggtggcactttgtgtgctctgcatggagagagtatagtgggactgatcctccaggnagtcaggtcctggagttggctgtgaacgagtaggggtccgagctgctggcagctttggcttaaagaggccatcccttccctttgcatttcaggtgtttgaggcagagcagtttggatgcccacagcgtgctcagaggatgaacacagccttcacgccattcctacaccagaggaacggcaacgccgcccgctcgctgacatcgctgacaagtgatgacaacctgtgggcgtgcctgcacacctcctttgcctggtaacgggcgtctctgcttttggcatatctgttaggatagagcagtcacgatacattggttggcttgtccatggatttgggagaacagtccttagccgtgtttgcttgctgcctctgtgaggagcactggcctgtgggcacttgtcagtgagcacagatctgggctgggagtccttgttctgtaggcctcttcccctgagtgtgctngaaaacatattgatgtggaactcacttcttccntgggttcaagtgattnctcctgccccagcctcccaagtagctgggattacaggcgcctgtcaccacacccagctaatttttttatttttggtagagacnggggtttcaccatgttggccnanggctgttctcaaactcctgacctcatgtgatccacctgcctcagcctcccagagtgctgggattacaggtgtgagccaccgcgncccagccntttttttttttttttaaagcaaatctgagtcgtatcattccagcncataaatataatcacaatactgtgatcatgtccgacaaaacggacagactcctgagtgttctccaggctgcaagcccttgtgcagtttaccttttgtctcacaagtgactgcattggcatcggagcagcgccccaagtctctctggtttagaacagctcccccnttgcatcccctcccctccaagttcctcccatccatctattgaaggaccttggtcgttgnacttgtggaactgcctgcatgcgggatcntggctggttgtgccctgctggtgttcttttatacccnattttttctttaaactggtaggatcaggggctgggtgagcgtcaggtttgctttttcctttggncgagaacgctcatagctggtgctgtgttctccaggctcctgaaggcgtgtggcagccggctgaccgagaagctcctggaaggtgctccgaccgaggataccttggtccagatggagaagctcgctggtgaggcaggggtgctgttgccggggccttggcnccggatggccgntggggcggtaccagctgtctgctctcctggcaggaatcgctgagggagggaaacgcggctctgaatcagcccagaacgagccttcgggaagctcaccctccgatctcggtgtgattgttgtgattgttgtgatttcctgtctcgtttgccttgaccgccatgtgaaagaatctgttccccagctaggtggggaaaattcacaggtgggctgtctgtagagagaactggctgattaaanggcttctcgtcccgattttgtgatagcncaagtgcttggcctggtcgacggtctttgctcctttacaaataaagtgttctgtttcagttcgtcccaagttttccatgaagggcagtggttccctgacctcccaggtgcctgggcttccccaggttcctgatctggggcttggggccctgntgtttggggatcgtggcactgtgtgncaccagcctggaagcactgggccangtcttggccaagctttccatcagggatgatttgatcttggtgctacaggtctgtggtacgaccattgttccacaccacatgtcattaataatgcttcccatgcttctgcttgcaaatgaccagccttccaaacagccagagctgtttcgaggtgtttctgcaggcaggtgcaggcgtgccctcaaataagctttgccaatggagtctcagcaagagcaaaacctggtcaggaaagacaaagcctgggaatnccacccccatgccctgcaggttggctggccctggagccatttattatagtgctaatcatgtttctaggcaggtgcagatggcaagggcagtgtcttggtgagctttttagcacgaagagccaggtctgntcgaagcctttgtgagagctggaaacgcagngtgtgctgggcatgcgcagtatggggtttcgggctcagggcttgccctttggcatcagacagacctggcttcgcatcctggatttgcttctgacgtgcacccttccnctttgggtctcgtgatgtgaaatggagatgttgtcatttgtgagggctccatgaagtttcgttgaaatgacaaatactaatttcttcatctgtgaaatggagataatagtgctgacctcagaacagctgagaggactaaatgaaatgatgttggatgtagccataaagaacgaagtcaggcactggtgcacgcctggaatcccagctcttgggagaccgagacaggtggattgcttgagctcaggagtttgagaccnagcctgagcaacatagggaggtccagtctctacaaaaaatatgaaaagtagctgggcgtggtggcgcatgcctgntagtcccactacttggaaggcttcgttgggaggatcacttgagcccagaagattgaggctgcagtaagccgtgatcgtgccactgcanttccagcctgggcaacagagcgagacactgtctcaaataaaaaagatgggaatagtagacactgggnggctccagaaggagggagggagggaggaaggnggaggaagggctgaaatgctttctattggatactatctgggcatattacttcctgtggttcactgtnctgggtgacaggattcatagaagcccaaactttnagcaccacgcagcatacccttgtaacaaagccgcacacgtacgccctcaagctaaaacaaaagtggaccgggaggccgaggtcgggggatcatgaggtcaggagtttgagaccagcctggcagataacggtgaaaccccgtctctactaaaaataccaaaaaaagttagccggacatggtggcaggtgcctgtagtcccagctacttgggaggctggggcagaagaatcgcttgaacccaggaggcggaggttgcagtgagccgagattgcgccactgcactccagcctgtgcgacagagtgagactccgtctcaaaaaaaaaaaaaaaaaaaaaagtggaaaaaaaagaaacaacgtgtagatcctcgagaactgtggccgactgggtgtgttccgtagacacgctgttggcatttttcttactgatttgagttttctcaccagcagagaacagctgacggtctttccataagtgcttctaagagagatgtgtggtaccccgggctaagtagacagcaactgagccctccctcccaccccagggctcccnagagcaacagggagcagggagcataggacctnggccgcagccagngaatctacactgaccggctcagcccatgaagtatcttggngctgaagtcacaggatgagactgtttgtatctgtaactgtccttgtcatctgtcttgcagatttagaagaggaatcagaaagctgggacaactctgaggctgaagaggaggagaaagcccctgtgttgccagagagtacagaagggcgggagctngacccagggcccggcagagtcctcctctctctcanggctgtgggagctggcagccccggaagctgccagtcttcaagtccctccggcacatgaggcaggtaggcggcaggggcnacagcgcatcaggangctcaggaggagagccaatcatgggctgntccctgcccacacgccttgcctctggaccctccaccttcaaaaccctgcaggaagtgactgacagcctcctcggtgggtggctgagggcacagggcgttgggggtattangccataggatcagtgctcccctttcagtgatgacctaagtatcttcaaagaaaagcccagatagttggcatcccatggtcctctaatcctctaagaagctcctaaaggcattgaacagcactgtnaattggtttggatgcagcctggacccntgcccattgtaagtgatggtctggctgggcgtggtggctctcacctgtaatcccagcactttgggaggccaagggggagcggatcacgaggtcaggagttcgagaccagcctggccaacatggtgaaancncccnatctctattaatacaaaaattagctgggcatggtggcatgtgccntgtagtcccagctacttggaggctgaggcaggagaatcgcttgaacctgnggaggtggaggttaacagtgagccaagatggcaccactgcactccagactggtgacagagcgagactccatctcaaaaaaaaaaaaaaaaagaaagtgatggtcattcttacaaaaaattaggaacaacttgcatatcaaaccatactagtaaacagtagccaaaccatggaatatgattaattagaagaaataaagcaggcactgtgtgttcagggtgatgtatgtacatgtgtgcctgccagacacgacaaaatctaacagtgttgtctccnagttacatcgagtcagatgccgggagagaggggtgtgggttgctggattacaagggcaggctgccttcttataaaattcttctgcatgaatttttnccaatgagcactgattcattagaagagagttatttgtttttgaaaatggagtgagactgatttcatggcagatgtccttggggcttctggatgtaaacacccattccatcaaaatcctgcatttggctgaaaccttccttgtccgttgcttatgttgatgaaggttggaaggggtctggaattcctctggaggtgggactactttgaggctgttggggtttggtgagacatagtattgtggcctctctcttatgttgtgtttncaaagctgnggtttggcttcttagaagccgtgagacagcaggctggactctcctaaggtgtcaatgtcatggaagttaataacaggtggggtgtggggagaggctgttctaggttaaagaataaggacgtgacaactaaaagccatgatggngtcctgtagtatctcctggatccaaagaacagcagccgtcaagcaggcagcagccctgggcttgtgcacacggctggatgtcagatgcgtccngtccaggcactcctggctgcagtcatggtctcagctgtggagatgcccttattctcctgggtgctgccatgtcgagggccctacagcttgctttcaaatggttcagcagaaagtgtctgtagagagaaggtgaatattgcacaaagttaacatctttttgcttcaaatttttaaaaacaaaactgggagaaagatcttggagcaagagctttggaatctagcatttatgtgcaaacctggaacttctctctctgcccctttaaccctgggcncgggcacccgcctccctgagaagataagtgtctttctcctgagccctgtctttgctctacaaagttttatgaacacacaaataacttcatgggnaagggnagagnaaaaaccatttctactagtcacgctgaaangcactgcactctcttgtttaggtcctgggtgccccttctttccgcatgctggcctnggcacgttctcatggggaaccaggtgatctggaaaagcagagacgtggacctcgtccagtcagcttttgaagtacttcgg

SEQ ID NO: 1648 - DNA, 950 bp, Homo sapiens
aaaaaaatagttagaaagaataaataagacctactatttgctagcacaacaaggtaactatagcaaaaaataatttaattgtacatttaaaaacaattaatagagtataattggattgtttgaaacataaaggttcaatgcttgcagtgatgaataccctatttacctgaatatgattattatgcattgcatgcctgtatcaaaacatctcatgtaacccataaatatatacacctactatgtacctaaaaaataaaaaatataaaatataaaaaatgcaggctgggcacagtggatcacacctgtaatcccagcactttgggaggccaaggcaggaggattgcttgagcccaggagtttgagaccagcctgggcaacatgatgagaccccatctctaccaaaaaaaattagctgggtatggggcatatgcctgtagttccagctacgggggaggctgagatgggagaattgcttgagcccaggaggctgaggattcagtgagctatgatcacaccactgcgctccagcctcagtgacagattgagatcctgtctcaaaacaaacacacacacacaatacggtatcatttacatcagctccctccagaatgaaatacttaagtacaaatctaacaaaatatgtacaagatttatatattttttaaaaactatgaaactctgatgaaagaaaacaaagaagtactaaataaataatgttccacgttcatggttaggaagactcaatattgttaagatatcggttcttcctaacttggtctatagattcaatgcaatcccaatcaatattccagcaagttatttcttatattgacaaactgattctgaagtttatatggagacatttaaaacaaacatcaccaccaccaaagatacccagagtagccatcacaatattaaaggagaacaaactcagaggactaacaccattc

SEQ ID NO: 1649 - DNA, 950 bp, Homo sapiens; identical to SEQ ID NO: 1648

SEQ ID NO: 1650 - DNA, 950 bp, Homo sapiens; identical to SEQ ID NO: 1648

SEQ ID NO: 1651 - DNA, 676 bp, Homo sapiens
cgcacctgcaggcccaactactcaggaggctgaggcaggaggatcacttgagcctgagaaattaaggctttggcaagccatgatcacaccactgcactctggcctgggtgacagagtgagaccctatttcaaaaaagaaaagaaaagaaattgaagaggacacaaaaaatggaaagatatttcatgttcatggataggaagaatcaacattgttaaaatgtccaatagatttaatgcaattcctgtcaaaataccaatgacattcttcacagaaatagaaaaaaatcctaaaaatcctaaaatatgtatggaatcacaaaagacccagaatagccaaagctatcctaagcaaaaaggacagaactagaggaatcacattatctgacttcaaattatactacagagctatagtaaccaaacggcatggcactggcataaaaacagatacataaaccagtggaacagaatcaaaaacctagaaataaattcatacatctacagtgaactcgtttttgacaaagtttccaagaatatatattgaggaaaggacagtctcttcaataagtggtgctgggaaaactggatatccatatgcataagaatgaaactagacccctatctcttgccaaaaaaatcaaatcaaaatgaattaaaaacatttaagactgaaaattat

SEQ ID NO: 1652 - DNA, 676 bp, Homo sapiens; identical to SEQ ID NO: 1651

SEQ ID NO: 1653 - DNA, 676 bp, Homo sapiens; identical to SEQ ID NO: 1651

SEQ ID NO: 1654 - DNA, 774 bp, Homo sapiens
taacttgtctaaatggattcaaaaagaagcagaaaaattaagtggttatgaaccttggaaaaagatatgtgtcaaataatttcctcaaaaaagtcccttggcccagagagttttatagacacgttctttcaaattgtgagagagcaactatttcctataatagaaaaactattttagggcacagaaatctataaaagttatcccagttcattttatgaaatgaacataacacccttaaagaacttgacaaagaggttgagcatggtggctcatgcctgtaatcccagtactttgggaggctgaggtggggggcggatcacaaggtcaagagattgagaacattctggtcaacatggtgaaacactgtctctactaacaatacaaaaattagccagacatggtggcacacgcctgtaatcccagctacttgggaggctgagccaggagaatcgcttgaacctgggaggcagaggttgcagtgaaccgaggttgcgccattgcacactccagcctggcaacagagcaaaactctgtctcaaaaaaaaaaaaaaaaaaaaaagaacttgacaaagatactgcactgaacaaaagccacaggccaagctaatatgtgatgttagattcaaatgtcccaaataaaacactgcactggcaatattgtttatctccaaaatgcaaggatggtttaagatcagaagatttgataacatcatctagttcatcaagaggtgcaataaggaagatcatatctgtttcaataaccttaatttaaaa

SEQ ID NO: 1655 - DNA, 453 bp, Homo sapiens
tacctaggttaaaccaacagccaagctaacatcattcttaaaattattcttagcagagttaggaacaaaacaaggaagccccatctcatcattactaattaacatttctctgggcatccagccaatgtaataagacaagaaacagaaatcagagttgtaaagaatggaatgtgggaaataaagtcattgctatttgcagagcgtctagctcaagggtaggcaaactatggcccatgggctagctgcctgtttttgtaaatgaactcttattggaatgcaaccccacccacttgtttacacatcatgtagggctgctttaagctacaatgacagagtagttgtgacagaggtcatttggcttgcaaaacccaaaatatttattatctagccctttacgggaaaattttgttgacccctcttctagtgtgtcattgaaaacccaggaaagccaat

SEQ ID NO: 1656 - DNA, 4968 bp, Homo sapiens
gtcccggaatgcttggatttcatgaatcccagcactgcccttgttccccaagcttcagatggttcaagtgaacctgtcaggaagcagaaccagtgtgacaatgaataagctcctggcaggaacctctgtagctcagcctctccctgatgtaatctgggttacttgtgttgcagcagaactgggaagaaaggaccctgaaaagttagctggttccaagtgaccctccaaggtatggagatgctttggggagctggtgagggaggcacagagcagactggggagtcaacggaggggccaaggtgtcccggtggggcttattagaacctgcctgaagggagggtctcctaagacacaaaccaccactgtagatcgtgtattagaattattctctaatctttattctgaaaggggaagagtgctggattcagagcccacctcaggggaagacaggaccctctccaagatggtttccctagaagctactacctctccctggagggtggagatatttgctggtcaaaggtattttcatgtttatttctacttctttcttctactggacataggaggattatgaattttatattaagcaattatgcaatttacaaactaatgagtttattacaatgtggtctttgacctgctggggttatggtataaacccaaggaaaatcttgcccaggtaatcagggtgtgagaacacgctcacctgtgttccagctgtatatgtccacagtgaattgctttggggacacacaaaaatgctcctgatcatatgaaaagtctagtgcctagtaggccatccataaacattagaatcttttctttatttttctttccacaccccggtgaagtgcaacagatataaatgacaagcctgtgaaaacaacaattttagaacttttttccatattcctcatcatatgaacatcagttagaaaaagtcattttaaggtagaaaacagaaaatgtgagctaaaacaagttaaatataaggtttttatgatgccaaacaaactaatttaggaaatgcatcgcctcaaattacatgatttatcacatatcaagttgaagaagcttaagcttctaaaaatggtcagagtaaacacatacaaaacgtaaaagtatacgaaggaaaataacacagacagaacagtccgatcttagtagaaatggatatgcttacagatgtttgcatgatacgccagtatgcagaaatcaggaaactgccttttgggagcaagtagtcagctgaaagttctgtgaataatggctttagagaattcatttctatataaccaacaccttaggaacattggttataaacacacatttgagggtataaaaattaaaaagatagaaaataattagtaagtaagtataacatttgggaatgtcacacaaacaaaaacttagcaaaaaccctttaggaacatgaatatcaatagctataactcaaaattgtcaatattctgttaaaattaaattgaaataacttctgttgaagacagtaaaaatgacacaaaagtatatgaaagaactcagcacataaacgacacagccaatattaattgaaatgagaaatatttacatgatcttccagcattgggcatttgatttcattgaacatttataacttctatgcttaaagtacttttagaatttgaccacagagttcatttgagagtaatacagacaaaagctaacataagatgggtgggtttagccaccttacagagtaaattatcctaagagatgttttataaaagagcagctaataatgttcggagaaacagccaagacataggtaaatatatcttcaggatggcatgacagaagtggaatgagaagagagtgaaaatgctaatgttctcaattatatttcatgaataattatgagttaaaagggcagaagttcatctgaaatcctttgaaacagagaacaaaagagaaataattgtaaggacttacttttagggtttgtttcagctgctagtgttaccttaactaagacaaattccttaaaagatgtggggtcttcttcccttgcacaattgtctctggacttaactgccagtgtgggattgcatttcccagccctcttatatttaggtggggtcatgttcttacaaaaggtatacaagcagaagagatttgtgcagcttccagggctgcagtggaaggagggcatgcatggaggaggagggcatgcctcctccatgtttggccttcccatcactggctggaagtgaaggcctacagggctctaggatggcgggaccatgcgatggaaggtgcctgggtccctgcatcaccagtggaaggctgtctgtcatccctgcctaggactttacatgagcaagatgtaaagttttattttgttaaatcactgtgatttgggagtttacctgttgctgtttatcctacctaatacattatttaacattactatggcgatgagaggaatgaggaagggctagtaactctaaagctaaggtattaggagctctcgagatcaattcatattctaaaaagcatcaacatatggcatgaaatactgactttttgcttatgtcatgcagttatcttagagtctgaggagtcatggtttattttgtgtgctatttggtttctcatgcaaactattttaattaataatataggttaacttacttaaacatagcccaatattgaataataatgtaagtgatacaaaatgatatttttgaggaaacactttgatacaatttagcacaatccaacaagattctaaactgcttttaataattgcttaattttggcttttactaaaatatatgagaaatgtgtactgttttgagaacttaaggggccagacgttttttgagaaaaggctttttagaaattctaacattaatacgtgtttcctgtaatattattgaaaaacatagaagggtttatttctcctagttcattcctctgcctaaagcaacttctgttgactacttaatgtacatcattccagatcacgaaattaaatacagatgtatgtaaacacacatgtgcatacatgtgtactcacatacacatatacaggtgtacgaatttatgtatagctaggagatttccctgcacaaatgacaaagtcttataaaaatgttacttgcttttttcatttagctatatttgatgagctattttcattgcagctcattttagataatacttgttctatttaatagctgtgtaacatttttcataatttagtaatttcaaaattaacacttgatcttttgaatttttgaaatcaatttaataccaaatccatgtacacatttctttgtgcagttacatatgtaagtatttctgtagaatggattcttagaattagtatgcgtgttttaaatgttgggtaaataatttcagttttttaaatccaaaatgtgtgccaatttatacctccaccaacaatgtgtgagtgtcatcaacatcacatgtaacaccattttcccctcacaatctattgagtaaaaaaatctcattttatagtagatttcctgattgagatagatgacattgtcatatttattggtatgttgtgtttattctgttgtctgtatctacatatttttgtccatttttctcatggatttgtgtattacccttttggttttttcacctatgttaaaatatattagctgcattactatcctctttcttaggatgaaatttcaggccagtcaaaaattcaggctcatttttctcaagcttttaatcatgggtagaaaagactccatatgtccaggctggaggagattggtataacttagtataatagttacagacatagtctctggcctttggaacacctaaagaaaagtcctcctgtgccacctactagctgtctgaggtgtacttaacatctctgtgccttgatttttttcatgtataaattgtatataatagtaatacttccctctggcaattgttatgaagattagattagacataaatgcatatgtgtaaaacattgtttgatatgaaacaagtactcaataaatgccaggaattaatattattatgtcacttgtgcaatgccagcacaaatgtacagatctgggaaactctgtgaataaaagttattcttaatctttttcaaatagggtaatgaaactgtttttacttccttagagaggacagttaatgtgaaacttcttttgccttattctgcaagtcttatgccattcatagttcatacagcataaatatattgaaatcaataattaattttgtggttactcttgaattcctactatttgtgaggctcaggagttcgagaataattctcaaaaattattctcaaaaattccatttaattttgtctcctatgtaaaagaaaaacaacatacattctaggaagttaataaaaaggcatagaatttgagaactaaaaggaacttaacaatcatctagtccgacatttcattttatatgtggggaaaccaatgtgcagaggaattaagtgacttctctaaggtcatgcagtgagtaggtggtaaattgggagaggaacccataattttgtgaaatatatatttggtctttgtccccatttcttggcgtacagtttctaaaactctaggaatccccagagtgataagagtatcttttgtatgttctgtggtttgaatgtgtcccccaaagttcatgagttggaaacttaatctccaatgtaacagtgttgaaaggtgggacctctaagaggtgattaggtcatgaaaactctgacttaatgcatggattaatggtgttgtctcaggagtggatttgttatgtggagattgggttagttacaaaagcaagtttgtccctctctcatcctctcacctttcaccatgcagcaagaaggccctctgcagatgctgacaccttgatattggacttcccagattccagaactctgagaaataaatttctattttaaataaa

SEQ ID NO: 1657 - DNA, 404 bp, Homo sapiens
agaagttagcatgaactttccctcaaactatccccattgcagaaagataatcagcacataattagagaggagtgaatttccttaccaatgtttgtagtggatgtgaaagttaaccaagaccaggagctacaacatgtctaggaggaattcatggtaaagtaaaaagaggcaacctggttagctcccacatttggactcaaggatctcagaagagtgaagcacctgaaggtttctgggagtttctgtgggagctgcagaatctttgcttctgtttctgattgaaaatgtatcagaatcctcagaaaaggaggtgttattctctgatgtgctcagcctggttgacagctgagggatcactggaggagctgggccatgaaacctcctgcatgctcatctccttgggg

SEQ ID NO: 1658 - DNA, 470 bp, Homo sapiens
gtcaaacttaagtaaagtgtttccctgagttctgtgagccactttagcaaattaattgagcctaaggaggggggtcatgagagtcccaatgtatagccagttgaacagaagcacaggtcgcaacctgaggcttgcaattaccatctgtagtgttgggtggggggaacaggcttgtgggatctgacactgtctcccagtagatagtgtcagaattgaattgatttttagggcatgcagtcggtgtccattgcagattgctaggtgtgtggggaaaaacctcaacgtatctgttgttagaagtaaattgttgagtgactgtgtgagtataagcaaaggagtaggaaaagcacctttggttttttcaatattttagagaatccagatgtcttggctctgagccagtcatctgaggaccaaaccaggccgtgcctagtagtgaacctcttctcttgacccaacaagattacaaa

SEQ ID NO: 1659 - DNA, 1438 bp, Homo sapiens
acctttgccccgcagcggccccgagcctcctccttgctgatctgagtaatgacggccgagctgtccatggggccgggcgcgctccgctccggcggactctggcccgggcgcccggcctcccccccggctgggccgaattcggggcgcgggggggaggggaggggtgggagggagggatccccgcgagctccggagggtaggggagccaggttctaggggggagggggagggagggggcgcggaggaaactttgttacaacatggagtttccttcccgcgagcgatgcaaacatggaacccaggcgccgtttcaaggctcccccttaaaagggcaaggcttcggcgtgacctggactcggctgcggctttcgccacttctgggaccggcgcggctaggcggactgggaggcgggccgggcgggttcctgccgcgctccagggggcgtcgcctcccttcctgccgcccgccggcggggctgagtctctgcggctgcgtggcaggcccggcacccggctcaccgttccaggccgccgagcgccctcggccaaggcccgcccgccgggagcgcccacgccggggagtgcccgagtgcggcgcggctccacctctgcgttttctgaagacccgggactagaggcttctcggtttcctcgttgaggacttggagatagcactacctcatctgtaaaatgggtcttctctcctgtctggtggtcgcagagatcacctcgcaaggacgtcaagagccagcgaaggctctgctggcccgaaacagctgtgcaaacctcagaatcacgctcttgaatgggacggtcgccgccccccgcagccccagggcgaggtgcccccggtctgtaggacgtgaaattctaactctctgccctgggaaagccccctgccgacctctccccacggccccacccggggccccgcacgtctacccgccgcgcacgggccaccgcgcgttcccgcctgaagttttcgtacgcgctgttcctttcgcgtagccaaattccaccgacctcgaggaaatgccaccttctccaggggccttcccagaccccctcccctgcccgcggtcgacggccgccctgtgattactgggggtgcggtgggagtcactggactcgctgccgatcctaggagcccagcacggcgccgcacgcggtggcccaaagcccgaccgtgggggacctcaaaccagaggccctcaaggcccgttccacccggcctgtggcgcagtgctgggcacttgggaacggaggtccctgtcttctcgctgcaagcccctccgtggtgcgcgccgtgggtctgcgggttggtctttttcctcgtttatgaagttcttttcactcgtcgttactattttgtaagttcaccatttaaaaattaataatgccaagcccgacaaacacccctcggcacttcctcccctcc

SEQ ID NO: 1660 - DNA, 509 bp, Homo sapiens
gcaaggtgctgtctggcacctgtggatttggaagcgtctcttccaacacagtccctcagtttccccatctgccaaacagggctggtaaaagcccaacccagggggaggcggggagccgtgcacaaagtcggggtgcattcagcaggctcttggggagtgccaagtgcgaccacgccctccctgggaggcctaaagggagcttccagaagagcaactctgcacccctcttcctggagggtcgatttgaggccaggctggaagaaccagagctactatggggggaatgggggcagctctaagtagacgccttccagtgtccaaatgactgaccttggcgcgacctcatcactagccctttgcccaggtcctgggtagccctttagccgggtctccgtgtcttcttgaccaacctgcccattactctgccgtcccccgtcctgccccacaagatctaagacgtccccagaaagcttcaggtcttggcagatgtgcacacacgtgcccccatg

SEQ ID NO: 1661 - DNA, 4345 bp, Homo sapiens
gacaacgcggagctggagaaactcatccaggagcggtcccagcagcaggagcccttgctgtgccccagctaccagtcctacttcaagaccattgaggagctccagcagaaggtgagggggttggccatatggggggccagcagcagctggctctctttgaacagtaagacattttcaagttcaagtgtacctcatgagagaaatttcttttcagattctgtgtgccaaggctgagaatgccaggctggtggtgaacattgacaatgccaagctggcctctgacgacttcagaagcaagtatgttgaacttcaaggtccctatggttctttcatggccctagggacctactattgcctggaagagaggagaaagccatttctctctatttctcctcctagggctggttatgtaaaattagtttcaaatagggaactagactcatgtgctgcctgctctttggtctatactggttttttttggaagtgtttcttaaaccacaaaattcagagattgaaatgaattgttctttgggaattgatttggtggtatattagctaacaaaaccgagaacacagtgagagacttcatctcatgtgtgcctgtgggctcctcgtggtgttaggtgagtcagggaacctcttcagcctatccatggacagcttgactgaagcatatggaagagaagaggcagaaaactgtaagttcaagaagattcaggccaattctacccaaacaacacatgagaggggaaggtggttttctttcctgacttatcctcccactccgacacgtgcaggtaccagacggagcagtccctgaggctgttggtggagtcggacatcaacagcatacgcaggatcctggatgagctgaccctctgcaagtctgacctggagtcccaggtggagtccctgagggaggagctgatctgcttgaagaagaaccatgaggaggtatgaaacaaattcacaaaagcaggcctcagaactaagctactagcactgggaatcaggagaggattactgtctggatccctggtctgggacccttctctgaggaactcaagatgttctcagagagtgacggtgctacatccatatcaaggagtggagtgagctgctcattcttcagcggctgggtgagggttaggcaggtgttggaattactgaggagggacatcattcattgagccctgctctctgctgatcactgctaggtcctgaatttggtggtggagatggagggacaaaaaagaaataagacatggcccttttcttaaaagagctcacagtctagtatagaaagacagtcatataaacacagtgatataaacaagacagagtgaaacaagtaccatatgagatgtacaagcagtatgctctagaaataatccaggctgcccaagaggagatagggaactcttctcagatgcaaagaggaggattccagtacttgggtgtttcagtctgagggaagaggttgaacaaagacacagaagtggcagggcagggtgtatctgggtatggctgggcatgcagtacctccaagggatgaaagtgaagatgtgatgggaagcgaggaaggacttgcatatgccaaggagtttagacttagtcttgtagaaggtgtgaggttgtttccgtttctatgggacaacaattgacgtgatccctgttggagtttattgctataaaatgtgtgtgtcactctttgggaatgatcagaatcttccttttagtgcttttttttttttgacggagtcatgctctgtcaccaggctggagtgcagtggcgtgatctaggctcactgtaacatccgactccctggttcaagtgattcacttgcctcagcctcctgagtagctgggattacaggcacatgccaccacgcccagctaatttttgtattgttagtagagatggggtttcaccatgttggctaggatggtttcgatctcctgacttcgtgatccacctgcctctgcctcccaaagtgctgggattacaggcttgagccactgtgcccggccccttttagtgctttctgggcagcatcaagctcattttcccagagcaggaagatggcacatcttccatgggacagcaattgatgtgatccctgttggagtttattgctataaaatgtgtgtgtcactctttgggaatgatcagaatattccttttagtgctttttgggcagtattgtgctcatttccctggagcaggaaaatggcagatccattgccgtaggttcattgtttcccttttctccaacaggaggttaacaccctgcgctcccagcttggagaccgcctcaacgtggaggtggacactgcccccactgtggacctgaaccaggtcctgaacgagaccaggagtcagtatgaggctctggtggaaattaaccgcagggaagtggagcaatggttcgccacgcaggtgggcatctaagcacatggccactcaggacccgaggtgccccagggccctggagacagggtctgatcctttccccacttgggtgtttcagaccgaggagctgaacaagcaggtggtatccagctcagagcagctgcagtcctgccaggcggagatcatcgagctgagacgcacagtcaacgccctggagatcgagctgcaggcccagcacaacctggtgtgtattgttcagacctgctggtgagcgatgggaacttgggaggcagagtcccggggatgtgcttggggccacacactctccttagctcttggagcttgtgacttccttgtaatcctgtgaagaaaccctttgaaggagcagctctctgacattcctgatcttccccaccacagcgagactctctggaaaacacgctgacggagagcgaggcccactacagctcccagctgtcccaggtgcagagcctgatcaccaacgtggagtctcagctggcagagatccgctgtgacctggagcggcagaaccaggagtaccaggtgctgctggacgtgcgtgcccggctggagtgtgagatcaacacgtaccggagcctcctggagagtgaggactgcaagtgagtatggggcaaataatgtctgggaagaatgtgtacagtgggatattgtaggcacacaaatggtggccatgttttcaactagtcaggcaacacacattaactgtgtagcatgtgtccagtgatctgtgatagctaagcaaagggaggccaaaggtaagggaacagcccctatctcagggggctaacaatggaggagtggtggcaggagctggccagttgtaggaataacatttgtgtaaggcacattaagttccaggagacctcaagagtatgagataatatttttgaaaagcacaatttttccacctctgcacatggcattctgggagagagagaagggtttggtagtaatcagaacttgattctggctgggtgcaatggctcatgcctataatccactttgggaggttgaggtgggtggatcacttgaggtcaggagttcaagaccagcctggccaacatggtgaaaccccatcgctaccaaaaatacaaaaaattagccaggcatggtgacgcatgcctgtgatcctaactacttgggaggctgaggcaggagaatcgcttgaacctgggaggcatagtgagccttggctcccacttgcagtgagccaagatcgcaccactgcactccagcctaggcaacagagcaagaccctgtctcaaaaacaaaacaaaacaaaacaaaaagaacttgattccaactaactccagccactgagaattcataggttgtgtcattaagcccaaggtattgtgtgcattaaaacctcctcctaaagccattctaaacctccttgtcctcctaggctcccctgcaacccatgcgccaccaccaatgctagtggcaactcctgtggaccctgtggcacctctcaaaagggttgctgtaattgaaaagcttgtatcctctttgaagacatctacaaagccatttagatcaaccacaggaaggatcctcaagtcctgacttttctggagctcagctgacatcaagaaacctcatcttgcctctatgttatttctagaatgctgaaaagctttcctgacccaagcaaagacacacatcatcaacttccaatgtctggacaactccttcctgttgagggtcgagcctgtttgtttctaaagatgttcagctccctgtaatctgagctccagttactacttaaggtgtttcctgaacgtactactgcatttcctgttttccttttttctttggcattctctggaatgcaaggaggagacttcatttacttcccaataaacttcatttctctggcataataaa

SEQ ID NO: 1662 - DNA, 154 bp, Homo sapiens
ggtgtggtggcgggcacctgtaatcccagctactcggggggctgaggcagataattgcttgaacccgggaggtggaggttgcagtgagccgagatcgtgccactgcactccagcctgggcgacagagtgagactctgtctcaaaaaaaaaaaaa

SEQ ID NO: 1663 - DNA, 509 bp, Homo sapiens; identical to SEQ ID NO: 1137

SEQ ID NO: 1664 - DNA, 278 bp, Homo sapiens; identical to SEQ ID NO: 1136

SEQ ID NO: 1665 - DNA, 504 bp, Homo sapiens
cactggccttggccacccacttctcccagcctgtgtcttcctgatcctgggaaggcctggatgaccaagcttggtgaaattcctccctgtacacaccctattaactccttggctgtggtcccccagctacaccaccagcccaggtcctggctgccagctttcctcctctgcccggcctctagcgcagtcgctaactactctgctgggctccctgggtctctgcccaaggccccgcacacactgggacctagcatagttcctgcctatgccaggagctggctctgtgtttaagaaaaggaggactgaaggacaaacaaccaagagtggcccagtccccacccccacatctagctcagtctcaaatctgagtgggaccaagtgcaattcagggcctttttctccactcacctgcacccagaagcagagaaaagcaggcactgttcacttttcctttattcttaatggccttcctctgttgcaacctcaataaacagcacaatctca

SEQ ID NO: 1666 - DNA, 504 bp, Homo sapiens; identical to SEQ ID NO: 1665

SEQ ID NO: 1667 - DNA, 504 bp, Homo sapiens; identical to SEQ ID NO: 1665

SEQ ID NO: 1668 - DNA, 291 bp, Homo sapiens
cccgctggaagtctactcgagtgggaaacgattgtctcctgcggagagatggggaatattaaaaagaagcctttggctcttttagctatatagaaacagtcctcgtcctttctaaattttctcttcagctgaaattagcaaaacaaactccacttacaccttcaatattagattcttaattttgcaaaattcctaactataacctgggccgaatatagttagaaggagtaggtattctctaaagtgagggcttctcccagaccctccccaccccactcaccatcagcaatt

SEQ ID NO: 1669 - DNA, 291 bp, Homo sapiens; identical to SEQ ID NO: 1668

SEQ ID NO: 1670 - DNA, 261 bp, Homo sapiens
atgagaatgggagggcctgacgagtcttatggtagcaagcgtccaggggaacccgcaatcctagtttttgggctcccatcaagagttgccaagaaagctgttgtgagctacttggaagtcaggacagctgggcctccagcctgcagtgacaatgaggctcagactgtgaatcagggaagaggggagtgtctcgggaaaggatggctagagcagactctcccccacccccaaagggactcagggatgaaaccaggagtctgg

SEQ ID NO: 1671 - DNA, 589 bp, Homo sapiens
gaaatataaagctttaagggtagcttggaaacttttctctttagaggaggtgaaatacaggattaagtgcctcactgagtccccagagctgaatgtcaaggccagccaagaggtggtgatttcggtttattttacatgcagaagtaggggcccgggttacctccttctcttagaattttggggaaattgatagtccagtgactcctacccacttttgggtgaaggacgatttggaatttgaagtgtggggagacaggcctgtgaagtccgaaggactcactgggtctccagatcccccaactctggaatgcagtgaatacccacccccgtgtttcagagcatctctcccatgtgttagacgtcgtgcagtcctgcattttggctgagacacctaaccccggtgcactcaggtcagagcgccagggcttcaggcagacagcaatgggtcacacgggtccttatagttccttcctcttcccaggagtgtcattttagattttacaacacgagcgaataaatcatctccaaaccaacaagatgtcaccttcaggctccccactgcaaaaaaaaaaaaaaaaaaaaaaaaaaa

SEQ ID NO: 1672 - DNA, 589 bp, Homo sapiens
gaaatataaagctttaagggtagcttggaaacttttctctttagaggaggtgaaatacaggattaagtgcctcactgagtccccagagctgaatgtcaaggccagccaagaggtggtgatttcggtttattttacatgcagaagtaggggcccgggttacctccttctcttagaattttggggaaattgatagtccagtgactcctacccacttttgggtgaaggacgatttggaatttgaagtgtggggagacaggcctgtgaagtccgaaggactcactgggtctccagatcccccaactctggaatgcagtgaatacccacccccatgtttcagagcatctctcccatgtgttagacgtcgtgcagtcctgcattttggctgagacacctaaccccggtgcactcaggtcagagcgccagggcttcaggcagacagcaatgggtcacacgggtccttatagttccttcctcttcccaggagtgtcattttagattttacaacacgagcgaataaatcatctccaaaccaacaagatgtcaccttcaggctccccactgcaaaaaaaaaaaaaaaaaaaaaaaaaaa

SEQ ID NO: 1673 - DNA, 261 bp, Homo sapiens; identical to SEQ ID NO: 1670

SEQ ID NO: 1674 - DNA, 660 bp, Homo sapiens
gctttctgtcatcacagattagcttgtcttttctagtttatataaatggaatctggagtatgtactttatctggtttatgtactttatctggtttctttcactcaatataaattgagattcacgcatgctgttacatgcagcaggagctcattcctctttactgccatgtggtattccaccatatgaatgtattagtttgtttatccatttgcttgttgatgcacataagttgtttccagtttgaggctattacaaataaagatgccatcaagatttgtgtacaagcgtttgtaatggacatacatttgcacttctcttgagtaaaggcctaggagtgaaatggctgggtcttatggtaggtggatgattaactgtttaagaaattgacaaaccgctttctgaagaagttatatcattttacattcctaccagcagctcattagagttccaaattctccacatccttgccaacacttggcatgaatagtcttttaaatgttatccattctattgtaataggttatacagtagcatctcattgtagttttaatctgcatctctctagtaactgatgttgtgtgtgagcatcttttcacctgcttatttgtcatccttttcttctttagtgagacgcccaaatcttttgcctgttttttttc

SEQ ID NO: 1675 - DNA, 1990 bp, Homo sapiens
gagtgcagtggcgtgatctcagctcactacaacctctgcctcctgggttcaagcgattctcctgcctcagtctcctgagtagctgggattacaggcacgtgccaccaggcctggctaatttttgtatttttagtagagacaagagtttcaccatgttggtcaggctggtcttgaactcctgacctcatgatctgcccgcctcggcctcccaaagtgctgggaatacaggcgtgaaccaccgtgcccagccccgtgttgtgacatttctatacacctgtgaaatcaccacaatcaagacaatgatcaaatccactgccccagagattccccatgtcctcatgccttttgcaatccctccccgcttcctcttcctctccccaggcaaccactgatctgctttctgtcatcacagattagcttgtcttttctagtttatataaatggaatctggagtatgtactttatctggtttatgtactttatctggtttctttcactcaatataaattgagattcacgcatgctgttacatgcagcaggagctcattcctctttactgccatgtggtattccaccatatgaatgtattagtttgtttatccatttgcttgttgatgcacataagttgtttccagtttgaggctattacaaataaagatgccatcaagatttgtgtacaagcgtttgtaatggacatacatttgcacttctcttgagtaaaggcctaggagtgaaatggctgggtcttatggtaggtggatgattaactgtttaagaaattgacaaaccgctttctgaagaagttatatcattttacattcctaccagcagctcattagagttccaaattctccacatccttgccaacacttggcatgaatagtcttttaaatgttatccattctattgtaataggttatacagtagcatctcattgtagttttaatctgcatctctctagtaactgatgttgtgtgtgagcatcttttcacctgcttatttgtcatccttttcttctttagtgagacgcccaaatcttttgcctgttttttttcttactgttatgagaacttcttatacattctagatacaagttctttatcagatattgcttcacaaaggttttgctagagtcctacaaactagctgccttggtccccatagactctcagctccttttcaactcagggagtccaccaggttctgcctctcttctccctccctgtgccaaggcctggaaattctctcgaggcaattagctggggctgtcactgggctcacctcatttgcttcctatctctcaagaatcaccttcttgatgtccagtgtcttgaaaacctttggttcatatattcttttttcttttttttttttgagatggggtctcactctgtcacccaggctggagtgcagtggcaccatcttggctcactgcaacctccgcctcccaggttcaagcgattctcctgcctcagcctcctgagtagctgggactacaggcgtgcaacaccatgcctcgctaatttttgtattttcagtagagatggtgtttcgccatgttggccaggctggtatcgaactcctgacctcaagtgatccacccgcctcggcctcccaaagtgctgggattacaggcatgagctaccgcacctggcctttttttttttttttttttggttgttttaggcaggaggttcatccagtccctgatgctccatctttagaatgggctttttcattttatattttataaaaaagagacgggttctcgctatgttgaccaagttggtcttgaactcctggcttcaagtgatcctcccatcttggcctcccaaagtgctgggattacacgtgtgagccaccacatctagcctagaatgggcatttattaaacatcacaagtgccaacacggtgctagacagtttatatgtgtttcttcatttaacaacaattctataaaacatcatcactttatacatgaagaaactg

SEQ ID NO: 1676 - DNA, 143 bp, Homo sapiens
tttttttttttttgagatggggtctcactctgtcacccaggctggagtgcagtggcaccatcttggctcactgcaacctccgcctcccaggttcaagcgattctcctgcctcagcctcctgagtagctgggactacaggcgtg

SEQ ID NO: 1677 - DNA, 140 bp, Homo sapiens
gagtgcagtggcgtgatctcagctcactacaacctctgcctcctgggttcaagcgattctcctgcctcagtctcctgagtagctgggattacaggcacgtgccaccaggcctggctaatttttgtatttttagtagagac

SEQ ID NO: 1678 - DNA, 810 bp, Homo sapiens
agcatagctccttcttggctgcagctaggagatgaaggccaagcccacccctacgcacagagaaatgtggcccttggaaccctgggcatggagtggccccagaagaaggtgtttgtgtgcccagggcctctccttcggggacaccaaaggaggtgggggagcacagtggatttttgaaagatcattaatagtcaataggccaacagacttcagtgggaattatttttaaaaaatgatatttatcattttggcctatttccttccagtattttttcaatgaatttacttttttttttttttgagcagttttaggttcacagcaaaactgagcaaaagctacagagaatttccatatatccccttcctcacacatgcacagcccccctccctatcaacagcccccaccagagtggtacacttgtcacaaatgaggaacctacatggacacatcattatcacccgaagtccacagttcatgtgtgggttcactctgggtgctgtacattctatgggtgtggacaagtgtatggcatgtatctactattacagtagcaaacagactaatttcactgccctaaaaatcccctatgctccacttattcatctgttcctccccaaaaacccctggcaaccattgatccttttattttctccaaagttttgccttttccagaatgttgtatctttggaatcatacactctgcagccttttagatcggcttctctcacttactaacatgcatttatggtttctccatgtcttttcatggctcaatagctcattttttcttagtgctaaataatatgcca

SEQ ID NO: 1679 - DNA, 1091 bp, Homo sapiens
tctattctttaaaacactttctaaagacacattctttgtctttgcagtgagaaactcactttagacaatgctgctttccctttccttgcatattctggaatcccagcagtttctttctgtttttgcgaggtaagtctgttcatttaaatgacaaatggagagaggctctctaaaaggaagtgatctgtatttgggaatagggcattgcaatgggaatgcctgtgctatagtcaactatgtacatattcagaggagtaaaggaaaacaagtttttaaggacaaatgacgaggattacaaaattactttgaggtaattattcttggctaccaagatcaataacaaggatgacaccagtccaaggttgacaggcagttgctaggcagattttctcacgagagaagttttttggtgcaaggttgcagtggcctttgtgtaaggttgtagtttttgtaaaaaggaaaaaaaaaaacccttaatccttgttatcagacatacaagggtgagacccttctcttcagggttgcatttttgttaacactagtgactccattttgattttgacaacttgcacatatcttagttgttgggttttttttgtttgttttttgttttgtttttttttttttttttgacaatggtgacttgctctgtcacccaggctggggtgcagtggcccgatcatggctcactgcagcctcaagcagtcctcccccttcagcctccaaactgtttggattataggcaagagctacttactacacctggccatggatcttcttgtgtcaactttgagaccaaatttactgcagtgcttaaaatgttttaagaagttatacacatgtgctggatgtggtagctcacgcctgtaatcctgtagcaggacaagccgcagacaaatcccctcagacaccgagttaaagaaggaagggctttatttggctgggagctttggcaagactcacgtctccaaaaactgagctccccgagtgagcaattcctgacctttttaagggcttacaactaagggagtctgcgtgagagggtcgtgatcaattgggcaagcagggggtacgtgactaaggttgcatgc

SEQ ID NO: 1680 - DNA, 21761 bp, Homo sapiens
  SITE (14542): n equals a,t,g, or c
  SITE (14551): n equals a,t,g, or c
  SITE (14552): n equals a,t,g, or c
  SITE (14553): n equals a,t,g, or c
ttccgcacacagtttggtggataaccattgtcatatacccggttcagcctggctcggcaagtagatggcgataacagtcatgtggagatgaaacttgctgtagatgaagaagaaaatgctgacaataacacaaaggccaatgtcacaaaaccaaaaaggtgtagtggaagtatctgctatgggactattgctgtgatcgtctttttcttgattggtgagaatgaccattccaaacttcaatgttttctataaccaactctgggaagtctgttatgtcagctcagcatatagttattttgtaccttattttttttttttttttttttggagacagaggcttactctcttgcctaggctagagtgcagtggcaccatgttggctcactgcaacctcagcctcccaggtttaagcgattctctgccttagcctcctgagtagctgggactataggcgcccacgaccacacctggctaatttttttttttttttttttgagttggagtctcactctgtggctcaggctggagtgcagtggcgtgatttcggctcactgcaatctccgcctcccaggttcaagcgattcttctgcctcagcctcctgaggagctgggactacaggcgtgcaccaccacacctggctaatttttgtatttttagtagagacggggtttcaccatgttggtcaggctggtctctaactcctgacctcgtgatctgcccgcctcagcctcccagagtgctgggattacaggcatgagccactttcccgtccactttatgcctttttaagtgccactaggaagacaatcatgagtagattctatacctgtcattgaatttaatctggttggaaagagagacccatgaattatttcaatacgacgtgcaagtgttttctttttatttatgtatttttttgtttgctcccactccaccaggaagcaaatgctacgctagaaaatatccgcaggacactggcggtgcagcagctcagtctcatgtttcaagggggtcttttggaaaaaactacctatgttttgaataggtagctatttgaaataaagctagtatataatttattaagtggtttaaagtatacaaaactgagatgcattatatactttaaaactacttagaatttgatgaaaaccagtattttcaaggcttacctgaaaatattaacagattaacagggatagattacaaatgaaattctgagttcagctctggaactttgtctctttaggatttatgattggctacttgggctattgtaaaggggtagaaccaaaaactgagtgtgagagactggcaggaaccgagtctccagtgagggaggagccaggagaggacttccctgcagcacgtcgcttatattgggatgacctgaagagaaagttgtcggagaaactggacagcacagacttcaccggcaccatcaagtgagtgccagctgctgtgcaagtatctagacaagtaattcaagaattatgataggccacggggaaacaataatggtgacactgtggggaatggcttgttagagaagacaagacttgtcatgtttagctaaagaggggaaggggcctgtaaaaaactgaaactatactggtaggggaaaaggtagaacttctctggggagtctcctttttcttaaaaaattaataggcccttgatgttttccccatctttgtagcttattgcttgctgtcattctctggctctgatttttcttcttaacctcttgtaacgttgtactaagctctgctttgctgacaaggacatcagtagcttttctctgttttaggaagcaacacatgccagaagtagcctttttcatctccttgatcatgggtaactgcctgccttaagtctctagtgcttcttaatttctgtgatactcacccattaacccctaggccagtcagtatccagagacaatgtctccctctggtggaggctggaatacggtggcgtgctctcatctcaccgcagcttcatccccctaccatagcctcctgagtagctgggactataagcacgcagcaccacacccagctaatttttttttttttttttttaagagatggagtctcaccatgtctcccaggccggtctgttcttagatttttatttatttacttatttattttgagatggagtcttacgtgttgcccaggctggagtgcagtggcacgatttcagctcagtgcaacctctgtctcccaggtttaagcaattctcctacctcagtctcctgagtagctgagatcacaggcttgtaccaccatgctctgctaatttttgtgggttttttttttttttttttttttttgcagaaacgggatttcaccatgttggccaggctggtgtctaactcctgacctcagatgatcctcctgtcttggctcccaaagtgctggaattacaggatgaggcactgcacctggccaaatttctattttatatttatttatttattttatttgtaatgggctttctggcaaaaactagaaagcatgctagacaaattctaaaagagctgtaacacttgtccatagagttttactatctttgcacatacatgcctctgtgcaaagaataaatttatcttttcctttttgcaagcttcctacacttacagtggtactataattctttagtcttaagttatggcattttctacttcatctagttgatgcttttgtgtttatttactgtacaccagaccttatggttaaagtgagagtatagtccaccccacaaaaatgtaagaactaatatgctgagtaaatagaaagaagtatgggagatcggaccaaggagcagttctgcttcagggtattcagatgcttcacaagtaggtgagaattgaaactatgcactctgttcagcacagtattactatcttagattttatagtagatctggaagctactcatttcccctaaaactatcctaagcagatacattgtgttatgatgaggctcttgaaggagtgctttgtagtgggtaaagaagctttgaagttacaagatttggggcaaaattttttttcttttgtgatattctggtcagtctagaagttttgggtcacagttcatttatctgaactatgagggataatattttgctttcaaaacaatttgtttaatccttgacttaaatgtttattttaaagtaaacttaagttcatttaaaaggcattttctcctccaggctgctgaatgaaaattcatatgtccctcgtgaggctggatctcaaaaagatgaaaatcttgcgttgtatgttgaaaatcaatttcgtgaatttaaactcagcaaagtctggcgtgatcaacattttgttaagattcaggtcaaagacaggtatgttgaaagatggtaaacttatttttatacaagtagctattttcaggtgtgctaaatatagcaaagactttttgttagtgttgttggcttttttttgaaatggagtctcgctctgttgcccaggctggagtgcagtggcacaatctctgctcactgcagcctttgccttctgggttcaagtgattctcctgccttagcctccagagcagctgggattacaggcgcacgccaccacgcccagctaatttttgtatttttagtagaggtgggatggtctcgaacttttgacctcaggtgatcagcccgcctgggcctcccaaagtgctgggattacaggcgtgagccaccgcatgcggcccaaaggcttttaaaataaaaatcaagcttaagatttagaggtaaatttcctcaagccaaataatgcaagacatactaaatgtaagctattgtgttttttggaaggatgaccttaggcttattttaacttaatctttttaacagcgctcaaaactcggtgatcatagttgataagaacggtagacttgtttacctggtggagaatcctgggggttatgtggcgtatagtaaggctgcaacagttactgtaagtaaagcaaaacagtgcatgagactcttccctattgaatcattcaaaactcatcttttctgttcttaggagttataaatttacctgtaaaatgtaaatgatcatgagatattttggttttcaaccctctaatgacacagtcaacatgcattgtcttctctctctaatcactttccccatgtcctgttttattttttctttatagtactgctagcagctgacattatctatgcctttgtttccattagaatgtgagccagatgaagaatcatgggttagttctatttactgccatgttgcagagctttggagaatgcctgacatacatagtagtatttgctaaacaaatgcatatcctccctgtggggacagatgtaaatatccatcttggctggggcctagtcttagcttgattcgttaatgcttgatctttttctatttttgttttgagacagggtgtcactctgttgccctagctggagtgcagtggcgtgagcttggctcactgcattctccaccaccacccaggctcaagtgagcctcttgagtagctgagatgtccagttaatttttattttttattttattattattattattattattattattattatttggtagagacagggttttgccatgttggccaggctggtcttcaattgaaactcctgggctcaggtgattcaccaccctcagcctcccaaagtgctgggattacaggaggaagctgcttcgcccagcccttgatctttttaaatttaggcaaatatagtcaaattaacacagaaatagagaacagatagatagaataattttcagcttaaaaatcacatttgtggctgggcgtggtggctcacgcctgtaatcccagcactttgggagtccaaggtgggtggatcacctaaggtcagagctaccagcctggccaacatggtgaactctattaaaaatacaaaaattagccaggcgtggtggtgggtgcctgtaatcccagctacttgggaggctggggcaggagaatcgcttgaagccaggaggtggaggttgcagtgagcggatattgcgccattgcactccagcctgagcaacaaaagcgaaattccatctcaaaaaaaaaaaaaaaatcacatttgtaagtcaggcgtatctctagtggataccctttcggggctggtgcagttctgtgttgattccttgcctttctggatacttgtgctttatccctttgcctggctgcctataagccaggagtttagagatgggtaggttgttctgttaaagaacattgaagatttttgttcaacttcaagctttctgtattgagggcttggttgttagtgtcagtttatggctgttcatctggactcttatgagcttaggaacatcatgacacatctaaagttggtgtatgcaagtcactttgttgtaatagatggtgttttaattttgggacagatttattatcagacctttcagttaaaacctatttctatgatgtcctcaaggctaagattgttccaggcctccagtcccatgaccagcctacataggcctctttaatctaaatgcccttcagatgaaaggcagcatgggataaaagcatgaaagacataggaggccaaaaatcttgattttattccaatagctctgacctaaaagttgtaaagttttttagaactcatgtcttttttaggccttggcctccttttatctcttacttgggttgcctgtcttaggtttgatctataacactcttctgtctcaagattttagagctgttccgataccataatgctcattaaatctaatgtctttgttctagggtaaactggtccatgctaattttggtactaaaaaagattttgaggatttatacactcctgtgaatggatctatagtgattgtcagagcagggaaaatcacctttgcagaaaaggtgagtatgagttattataatattaaatacagtacttttggtatcttactcttcaggtaagtgatatttcttgttaatattcttacattctgaaaatcagcaatcttaaactctcataccagataatataatttattaaaatgctcaacaaatgaagtaagttccacttacctaatcagaagtgcttaagtgaaagctatttctctgtataactcagttttacgcatatacagaattcagctaaaagcatgttttataaaaaggaaaattaatagccaaacatacacaaggaactagagtggaacatatcaaaagacagtggtgatttctgcatttttaaaaaaagtggcagggctcacacctgtaatcccaacactttaggaggctgaggtgggaggactgcttgagccctggaggttgtgagatgtgactcgtgccactccagcctgagtgacagtgagactcaaaaaagtggttgtcttagatgggtttttggtatttttcttttcttttttttttttttttttgagacggagtctcttgtcaccctggctggagtgcagtggcgtgatctcagctcactgcaacctccgcctcccaggttcaagtgatgctcctgcctcagccttctgagtagctgggattacaggtgcccaccaccaccatgcctggctaatttttgcatttttagtagagacagggtttcacgacgttggcctggctggtcttgaactcctgacgtcaggtgatccacctgccttggcctcccagattgctgggattacaggtgtgagccaccactcctggcctttggtattccttttttttttttttttttttttttgagagggagttttgctcttttgtccaggctggagtgcagtggcgcaattttggctcactgcaacctctgccttatggtttcaagcgattctcctgcctcagcttcccaaatagctgggaatacaggcgccagccactgcgcccagttaatttttgtatttttagtagagacagggtttcaccatgttggccaggctggtctcgaactcctgagcttgtgatccccctgcctcagccttgcaaggtgttgggattacaggcgtgagccaccactcctggcccgttactcttattttgcaaacaagtgagttaatttttcaggaagcaattaataaattaccagataaacaatttgaaatatttggaagtattataagtttagtcctctgtaaccatttggcctttagcataatgtccaggatgtattctcatttcgtatgatcagatcttcattttctgagctttatatgttttcttttaggttgcaaatgctgaaagcttaaatgcaattggtgtgttgatatacatggaccagactaaatttcccattgttaacgcagaactttcattctttggacatgtgagttatttcttgagtaaatcaccgttttgagttccttgagttgttcttggattcctgtattagcagaaatagcactgtgtcttccttaactgctcttttttctgggagggcgttagcagtaagcaagaagatagattacattgactttgaggctttattatttgttgctaaaagtactttgtcaatagtgccttgaatttgagaatttccatatgccatgaaaacaggagtcacattgtagagccactcagatttttgaggcttcaagttggtaaactaaggttgggctgcagccttataccaaacctgaatcttacagagaagttttgaggaagtatgtgatggagtgaattgctcttttgttttcctaggctcatctggggacaggtgacccttacacacctggattcccttccttcaatcacactcagtttccaccatctcggtcatcaggattgcctaatatacctgtccagacaatctccagagctgctgcagaaaagctgtttgggtaagtttttatttgaaagcggtcttgcatagtgaggttttatgattagggaagaacggtaatatgttgattaaaatgttaaacatgatgataattttccacatttgggaatttggaggatggttagctgttaccttggtacagatataaatgaatttttctctataaagagatcttaataatggactttggacttataaacacaggagaataaggagacttataaacccagtgaattccttgtgcaagattcctggcatagcttctgctcaagtacttctgtgctgaagcacgatgcctatagcagcccattcagttagtagagagaatctgttagaattcatattgggataaaatcctattccccgaaacatccatttgtctggatttttcttctaagcaatacggtatgattccagttaccttgtctatagattgagaagccttgcttcttatgatggtttccagagaaaccatttatggttgtggctcgctcctctggatatcctccctgtaacgttagtgtctctctttaaaaacagagcccagttccattagagtacgtagcattaattttgatttggatgtggacatatttatcatttcctgttattacaggatggagatctagtttcaggcctttatgaaagcatttatctcctgtatgacataggttctctgatcctgtttctttaacataattggatagtgaaaatatattctacttgatagtctcaaatgaagaacatctgtatataaggagtatatgaaataccatgactgttgatcatgctgagaggcctttagcataggggagtgtgtaacataccatgactattgataacgctaagaggcatttagcataggtgatttttttgactcattctacctaccacctacaaatcgtaaccaacctgtgaagccagcgtcccatcttatccttatgtagtaggggagtaataatgtttcaacctatatttatgtaagtaagcccccttaggagcagctattatttgggtaacacagaggaattagataggggaagcacaagattttttttttattttgacagtctcactctgttgcccaggcaggagtgcagtggcatgatcctggctcactgcaacctccacctcctgggttcaaggaattctgcctcggccttccaaagtgctgggattacaggcgtgagccaccgcacccagctgaggaatattttttataactgagctaagaatgtgtactatccttgttagtggtgacagttgggaaacataaaagtgtattaatattcttttatatattagaagaacttcattttgagtccatcttggtatgtattccaaatataaactacgtaagtatgtctggcagaaaggcgcatagttagagaagtgttttaaaatattgcttaattaatggtttccaattggctgcctgcagatcaaagtaagacgcaaatggttcaccactagagagtaagtttttttttgtttttattttgttttgttttgttttgtttttttttgagacaggacttgtgctctgttgcccaggctggagtgcagtggcgtgatctcggctcactgcagcctccgcctcccaggttcaagcgattctcctcctcatcctccttagtagctgggattacaggcgcatgccaccatgcccagttaatttttgtatttttagtagagtcggggtttcaccatgtcggtcaggctggtcttgaactcctgaccttgtgatccacctgcctcagcctcccaaagtgctgggattacaggggtgagccacttcgccgggctgagagtaagttttgtttatatgtcctcttaatctgtaacttcactggacaggagtaaaccctgggcaaggaacaataactcagaacttacgcctgctttctgattctaggaatatggaaggagactgtccctctgactggaaaacagactctacatgtaggatggtaacctcagaaagcaagaatgtgaagctcactgtgagcaatgtgctgaaagagataaaaattcttaacatctttggagttattaaaggctttgtagaaccaggtaaagaccgcccccccccccccccgccccgctttttttttgttttcttttctgttcctaaggatgtggctagagaaggagcgagtgtaggaatgctggcttggcttggtttatgaagtgctcaatcttgtctgtcctaaagttaattgtttatgtgttagtttcttttttttttttttgagaaagagtttcactcttgttgcccaggctggagtgcagtggtgtgatctcggctcactgcaaactctgtctccaaggttcaagccattctcctgcctcagcctcctgagtagctgggattacaggcacatgccaccacgcctggctaattttgtatttttagtagagacagggtttctccatgttggtcaggctccatgaggtcagagctcctgacctcaggtgatctgcctccctcagcctcccaaagtgctgggattacaggcatgagccaccgcgcccagcctatgtgtcagttttattgggaggtaataaggccctaggaaattcttgttaaaaattgaccattatgactagaaaatctattctaagttattgactagaccagtgataagcaaatttcttaagggggcagataataaaccttttgccaggctatacagtctctcttttagctgttcaactctgtgggagcaagaaaacaggcacagactgtgcgtagtgaatgggcatgcgggctgtagtttgccagtccctggagttaactttaaatgcaatcaaacagccaacacttactaagaaataagtccttggacttaagtagtcagtaaatttaattagtagtgtaggaaaaaagtagctctactagtaaggtaaaattaatattctcatgtgaatttttaattcccagagtttttagtcagatttgaagtaaggctcttttatccttaatacatatactgtgcttttacctttctactgatgtgctaattctagaaaagtttagaagctgattatataagttctttcttcctcttttttcttttttaaagatcactatgttgtagttggggcccagagagatgcatggggccctggagctgcaaaatccggtgtaggcacagctctcctattgaaacttgcccagatgttctcagatatggtcttaaaaggtagagtacaaattttgattcttttgaatattggtgcactgcatacagttctagatgttatactgtgctttgctcactttgcctgcattcctgtggttctcatgctagactctagttcttaaatacaaggcagattgtcttttgttgtagctgccttttcctttgaaacagctttccataaagtgtcttaactgtgctagaaatcaccagtttctttgagacagtggagttactgagccctagtgcttagtgtggtggatccagagtgataaggtggatcatagtccctaagcaatctatttgaaagcagtagcatacctctctactcatgtactgaggcctaacagctattgaaattttgttctgtttattcatttattcattttttgagacagagtttcactctgttgcccaggctggagtgcagtggtgtgatctcacttagctcactgcaacctctgcctcccgacttcaagcaattctcctgcctcagcctcctgagtagctgggattacaggcacccacaaccacacccggccaatttttgtatttttactagagacagggtttcgccatgttggccaggctagtctcctgacctcaagtgattcacccgcctcagcctcccaaaatgctgctagtgagccaccgtgccctgcctcttttgtttatttttgagcctttctgtcctactttccactctttcacactcctacccacccacacattcaaaatcacgtcacattcttgaatctttgggtcttagggcaaactgcaatgcttaactttaatacagagtacattaatggagaaaaagatacagtgagggaagtgggagggatggagggcagtgtgatacatgtaacctcaaaaggtgctgtcacaaatatagtttctctgcaaactcttcttgtaacttaaatttgtgaatttttattttattttagaattatttttttaaaaatccaatgtttggatttacctctgaagatttttctcaagatgtgcatcatcatgcttacactgttttcaatgatctctgggtccagaagttaaggaactccaagaatgaaattgtgaaagggtgactactggcccctgctatgtactcaaaatcttatttgcagatctcctatcttgctctttgtaggttactttaaaaaaaattattcctattcttttattcttttacctggggtctcaaaaaaagattttgttagttttttttttcttttttggctcagaaaaaaaagattttggaatctgctatcttggaattagaccttctgattcatcttaagtgggataccttccatccttgtctgtgtataacctttcctcaggtaaagctaacttttttctctttcagatgggtttcagcccagcagaagcattatctttgccagttggagtgctggagactttggatcggttggtgccactgaatggctagaggtattctttatcatcccttcccatattggacacgagcttgtgggcttaggctgttgtccagaagtgatgtttttataggtttgattttaccacttttgcctttgcgtttagtctcagtagagtccagaattgaaaatgaatccctaatgctactgtatgtgataaataaacagatttatacttattagtgttttcccttctcttctagggatacctttcgtccctgcatttaaaggctttcacttatattaatctggataaagcggttcttggtaagtatccctttcattagctgtgtatgaattcaggtaaacttttttgagatggagttttgctcttgtcgcccaggctggagtgcaatggcacgatctcggctcactgcaacctctgtctcccagattcaagcgattctcctgccttagcctcctgagtagctgggattacaggtgctcactaccacacccagctaattttttgtatttttagtagagacagggcttcactatgttggccaggatggtctcgaactcctgacctcaggcgatctgcctgcctcggcctgggattacagatgtgggccactgtgcctggccagataaactactttgaagtggaagaaagcttttttttttttttgagacagggtctcactgtattgcccaggctagagtgcagtggccaatcttggctcactgcagccttgacctcctgggctcaggtgatcctcccacttcagccacctggctaattttttttgtagagatggggttttgccatgttgcccaggctggtgtcaaactcctgagttcaagcattctatgtcagctgcccaaaatgctgcggttacaggcatgagccattgccctcagcctgtatcttaaccttcctttaaatagtctgtcaagttacacagtgagcacaattgcttgtctagaacagtgggtagttctcagtgtggcccccagatgagtagcattaggaactgttacgaatgcaaactgtcatgtctaccccagacctttgagtcagaaatgggagtgttggtctaaaaactgggctttttgggctgggcgctattggtgcacgcctgtaatcccagcacttgggaggccaaggcaggcggatcacctgaggtcaggagttcgagaccagcctggccaacatggtgaaaccccgtctctactaaaaataccaaaattagccgggtgtggtggcgagtacctgtaatcccagctactcaggaggctgaggtaggagaatcacttgaacccgggaggcagaggttgcagtgagccaagatggcgccattgccctccagcctgggcgacagagcgagactccatctcaaaaaaacaaacaaaaaaactgggctttttttttggcaacccttggggaataaaaacctattattttcttaaggacaaagtatcctgaagcaaaaaaacccaaacaaagaaacaaaaaactttaacaagcactacaggtaattctgatggactaaagttttaggaccataagtctggactatattgaggtgagaagaaactaaactatgccatatagaatggtacttagagagtaattcacatcctgttacgttgtggcatcactgatagaaatattggataatgaaacttctagaagagtttgaatgttcactggcagcagaaaattgacaaaagggtttgaatgttatttaaagtgcagctgtacattcaacaggaatggggtaaaaaagaaagtgcagatgtagctgatgagctgagaatagtgaaatgtctacatgggggaaaaaaggaaagagttacaattaaacctctctaggttagttatttccctgttgtatgtttgccgcagaatgtgctgagtatagcaagcatactatgtatagctctaacctgggtgaaccagaaagttaaacatgaaattgctaatgggggaggctgcacatgtgtgggggcagtggatttatgggacctctaggtacctttctcttaattttgctgctgaacctaaaactggncagaaaatnnnttttttttttttttttttttttgagatggagtctcgctttgtcacccaggctggagtgcagtggcgccatcccagctcactgcaagctccgcctcccgggttcatgccattctcctgcctcagcctcccgagtagctgggactacaggtgcccgccaccacacccggctaattttttgtatttttagtagagacggggtttcactgtgccagccaagatggtctcgatctcctgaccttgtgatccacccgtctgggcctcccaaagtcctgggattacaggcgtgagccaccgtgcccggcctaactgctctgatatttttaaaaaaggtgacttggattaaagtatgcaaactcaaggagtagtacgagcccacttgagtgaagttagcttagttgctaaagagcttgataccaaaattacttttgtttacttgatgaatgggatagttgttgcacagggccactgatctagattactgtcttatttgtcaagtacttatagttgtagaagtagcagtgtgaaaattatcggaatggagaaggggcaatgataaaacaatttattttcaggtaccagcaacttcaaggtttctgccagcccactgttgtatacgcttattgagaaaacaatgcaaaatgtgagtatatacctcattacaaaaatgtatgacttaatttttgttgaatcaacctgagataaaaaacactgatatgtaaaccgtagtcagtaacaaaaaataggaattgagaataaattttatagcagcgttatttaagggatacttgcctattgaaccatatgagatgagggctccaatcttaaagaatatgttgtttatttaggaatatataacaaaatgccatgaggcctaagctgtagtgcaggggcccacaggggattgtctatagagtcacaatgctaaggaaggcttaaatcaacttgaactatactttgagaaggccggaggaaatattcattgaataaacaattaccatagttttgaatgagggagagcatgtgaaagaaaatatttgcctatgtggggtggggggaggggagagggatagcattgggagatatacctaacgctagatgacgagttagtgggtgcagtgcaccagcatggcacatgtatacatatgtaactaacctgcacaatgtgcacatgtaccctaaaatttaaagtataattaaaaaaaaaataaataaataaataaaaaagaaaatatttgcctaatgggattagaggctgtatattggagtgagtaaagttagaaacaggtcagatagcagacattggccttgatccaagagatactagggattataggatctcaagcaaggtgatcatgaatttgccagttaggttggtggcataagatgcactagaaggaagaaaccagaaacaagataggcatagtgtgaagcccagagagggcttttacaattgtgggtaagccaccatggttttgtttgtttgtttgtttgtttttgagatggagtcttcctctgtcttcctccagcactcaggctggagtgcaatggtgcgatcttggctcactgcagcctccacctcctgggttcaagcgattctcctgcctcagcctcctgaggagctgggactacaggtgcacaccaccacacctggctaatttttgtatttttagtagagacggggtttcaccatgttggccaggatggtctcaatcccttgacctcatgatctcttgaccttggcctcccaaaatgctgggattacaggtgtgagccaccgcgcccagcttttattcatttttttttccttttttttttttaagagataaagtcttgctgtgttgcccaggctagtctcaaacttctgggctcaagtgatcctcccagctcggcctcccaaagtgttgggattgcagttgtgaactaccccacccggcctaggcccacttttaaaatgttaattaagaagaaaacattttttcctcaccataactaaaggaactgacaacatgagcctagttagtaataacttaaagttgagattgttttaactatcataaataatttcttttcaagaagatataatacaagttttttatttaaaaattgttatagagtaacatgttagtgactagcctgaataaataagttccaaaaggttagttttaatgataatttcttatcttacaggtgaagcatccggttactgggcaatttctatatcaggacagcaactgggccagcaaagtgtaagttgagaaaagtgaatgaacaaactaatagaaaagcagagattctacctactacattaggtagaatctaaatctgtccttgcattgaacttacttacacctaaagatattcagctaaagaatttattttggatggggggactagcacgatagaacagtctattctttaaaacactttctaaagacacattctttgtctttgcagtgagaaactcactttagacaatgctgctttccctttccttgcatattctggaatcccagcagtttctttctgtttttgcgaggtaagtctgttcatttaaatgacaaatggagagaggctctctaaaaggaagtgatctgtatttgggaatagggcattgcaatgggaatgcctgtgctatagtcaactatgtacatattcagaggagtaaaggaaaacaagtttttaaggacaaatgacgaggattacaaaattactttgaggtaattattcttggctaccaagatcaataacaaggatgacaccagtccaaggttgacaggcagttgctaggcagattttctcacgagagaagttttttggtgcaaggttgcagtggcctttgtgtaaggttgtagtttttgtaaaaaggaaaaaaaaaaacccttaatccttgttatcagacatacaagggtgagacccttctcttcagggttgcatttttgttaacactagtgactccattttgattttgacaacttgcacatatcttagttgttgggttttttttgtttgttttttgttttgtttttttttttttttttgacaatggtgacttgctctgtcacccaggctggggtgcagtggcccgatcatggctcactgcagcctcaagcagtcctcccccttcagcctccaaactgtttggattataggcaagagctacttactacacctggccatggatcttcttgtgtcaactttgagaccaaatttactgcagtgcttaaaatgttttaagaagttatacacatgtgctggatgtggtagctcacgcctgtaatcctgtagcaggacaagccgcagacaaatcccctcagacaccgagttaaagaaggaagggctttatttggctgggagctttggcaagactcacgtctccaaaaactgagctccccgagtgagcaattcctgacctttttaagggcttacaactaagggagtctgcgtgagagggtcgtgatcaattgggcaagcagggggtacgtgactgggggttgcatgcaccggtaattagaacagaacagaacaggacgggattttcacagtgcttttctatacaatgtctggaatctatagataacataactggttaggtcagggctcgatctttaaccaggaccagggtgcggcagcgctgggctgtccacctctgccttttagtttttacttcttctttctttggaggcagaaattgggcataagacaatatgaggggtggtctcctcccttaatcccagcactttgggaggccaaggaaggcggattacgaagtcaggagtttgagactagcctgaccaaaatggtgaaaccccgtctctgctaaaaatacaaaaattagtcggacatagtggcgtgtgcctgtaaccccagctactcaggaggctgaggcaggagaatcgcttgaacctgggaggcagaggttgcagtgagctgagatggagccactgcactgcagcttgggtgacagagcaagaccctgtctcaaaaaaaaaagttatacacatgtaattattgcatgttccttcattattagttttaacatagacttgttaatctcaattagcttaattagcatttgagtttattgctaaaacttctttatgagttttaataatgaggcttggccgagtgtggtgggtcatacctgtaatcccagcatttgggaggccaaggcgggtagatcacttgaggtcaggagttcaagaccagcctggccaacatggttaaaccccatctctactaaaaatacaaaaaaattagctgggcatggtggcacatgcctataatcccagctgctcaggaggctgaggtggaagaatcgcttgaacccagggggcagaggttgcagtgagccgagatcgtgccattgcactctagcctgggcaacagagcaagatcgtctaacaacaacaaaaaaaaaaccaaggctgaatttcttgagtgattgagcagtggctatctattggacagtccagctgaacagtattttcctcaggctgggtgcagtaactcacacctataattccggcacattgggtggctgaggtgggcagatcacttgaggccaggagtgagaccagcctgggtaacgtgcctagactatatctctacaaaaaattttttaaattaagtggcccaggggccagctgtagtcccaactccttgggaggctgaggcaggggggtcacttgagctaggagcttaaggctgtggggagccatgattgcatcaccacgctccagcctgggtgacagagagagacctcgtctcaaggctgcagggagtcatgattgcatcgctgcactctagcctgggtgacagagaccttgtctcaaggctgcggggagtcatgattgcattgctgcactctagcctgggtgacagagagaccttgtctcaaggctgtggggagtcgtgattgcatcactgcactctagcctgggtgacagagagacctcgtctcaaggtatgtttcatgtatcttctcttttttcattgataaaggcccaaacttcccagagagaaaaacatacagccttaaggaatttggctagaagtctattcagggcatatgatacgatagaacagggattctgtagaacctggaagaaagtagtcactctaggagtaggttagcttgagagaagtagcaagaatgtacttaaagcagcagataatgagatagaattggggtaaattgcggtaggaatatgttagaagcaagggtggaactgtcgtcactgttacctcgatggcgaagccagaatgtgaggctcttgctcttagaactcacgtgagtaccatagcctcgcgttgtcttgcaggacacagattatccttatttgggtaccaccatggacacctataaggaactgattgagaggattcctgagttgaacaaagtggcacgagcagctgcagaggtcgctggtcagttcgtgattaaactaacccatgatgttgaattgaacctggactatgagaggtacaacagccaactgctttcatttgtgagggatctgaaccaatacagagcagacataaaggtgagcactgattccaattacgtttttattttgctgaatgtcaagtattttgaaatgtgatgtgttcctgtgtgttcctgttggaagggtgattgtagccatagtacattttaaagtgaactgaggtataattgtatgtagaattggtaacttgtttgagagaagtcgggaggctgtggattagagacctaggacagagctcagcaggtgtttcagaatccagagcagtgtcaggttttctgtcactcatgtctcccaggcagcccgtcagtaggacacggaatatgaagatctcagcaaggagttgggctgtgtgcctctcgggcgtgacccggatggaaagacagcacagctagcaggattccatctcgtagtgatctgcgcatctaaaagtcaaatattctattaaacgaaactgataagcagggtgaggtggtgcatacccgtagccccagctacttctgctgaggcaggaggattgctggagtccagcccaggcaacatagcaaaatcccatctctaaataaattaataaaactaatattaaagtagcttccagattgttttatggtactaggagttgatttttaacagatctcttaattgaagtaaatcactgacaaccgaatctttttatatcttttttatttttatttttattttattttttttgagagatgaagtctcgctcttgtcccccaggctggaatgcaatgacatgatctcggctcactgcaacctccacctcccggctttaagcgattctcctgcctcggctccccaggtagctgggattacaggcgtgtgccaccatgcccagatagtttttgtgtttttagtagaagccggggttttaccatgttggccaggctgaagtgcagtggcgagatctcggctcactgtaagatgcgcctcccgggttcacgccattctcctgcctaagcctcccgagtagctgggactacaggtgccggccaccacgcccggctaattttttgtatttttagtagagccggggttttaccatgttggccaggctggtcttgaactcctgacctcaggtgatccacccacctcggcctcccaaagtgctgggatcacaggcatgagccaccacgcccggcatcttatgtctttcttgaaactaattgtaactgttgaaaatggaacttaccaggtggaaataactaaatcctgaagtaccttgaaccaaaatgttttcccctatagggacattttcccccaaaaggagaattgaactggaaacaatatagtacataggattatataattatgttcaatttcttaatgagaatggttttcttacatgctgggctcaaatatgagtgtatatcacagtccatagagcttggaacccctgtgcaaggtgctttcggagtcttgagcttatctgcgagttccttttatcagaatcttacttaacgcacgttaaattagaaaggcatacaaaagaatgtccttagaaataaaacttctcatagcgaataatgtctgtttcaggaaatgggcctgagtttacagtggctgtattctgctcgtggagacttcttccgtgctacttccagactaacaacagatttcgggaatgctgagaaaacagacagatttgtcatgaagaaactcaatgatcgtgtcatgagagta

SEQ ID NO: 1681 - DNA, 354 bp, Homo sapiens
gagataccatctcacaccagttagaatgacaatcattaaaaagtcaggaaacaacagatgctggagaggatgtggagacataggaacgattttacactgttggtgggagtgtaaatcagttcaaccattgtggaagacagtgtggcgattcctcaaggatctagaaccagaaataccatttgacccagccatcccattactgggtatatacccaaaggattataaatcattctactataaagacacacgcacacgtatgtttattgcagcactagtcacaatagcaaagaattgcaaccaacccaaatgcccatcagtgatagactagataaagaaatgtggcacatataaacc

SEQ ID NO: 1682 - DNA, 18692 bp, Homo sapiens
cctctgcggcgtcactgggagcccgacggaaaactgcgctaaaggcttgtctttcccctgcccgaccgaaggagccgaccttgcctgcgctacagcttccttattttcgtcgcctgttctcctgatcctgcgtgttctaaaaaccccttaggctttccatgggttcccagaccatggcggtggcgctgcccagggacttgcggcaggacgccaacctggcaaagaggaggcacgcggagctgtgcaggcagaagcgggtcttcaacgccagaaacaggataattggggtgaaagggcaggggccgggacggggttagagcggcagatgcgggcgaggggctgcgtggagggggaaaggagatgagttctaggatgaaacatctgagccaggaggcagcaaacggcctcctgcagggccaataatgctccctctcgagctcgcctggagtcaccaacggttctcctcccctgagccagattttctacaactcgtttacagtggggcagagattaaaaataataataagtaggattgttattactgaataaaatgatctggctctaacccttctcctctgtttttccatttatagggagacactgaagcctgggatgttcaagttcatgaccagaagataaaagaagctactgaaaaagctagacatgaaactttggtgagcatttcctgaatgcttatctattggtttaggattgtgtggctttagactccagtcttccccaccgtccccctgccccgcctttttttttttattttttattttttttatttaatagagatagggtctcactatgttgcccaggctggtctggaactcctgcgtgcaagtgatcctcccacgtcagtctcccaaagtgctggaactacaggcatgagccacggtacccagccctcctttcttcacatatataaaaagttgtcattttcacactcttcttccttttaaatttcacaatttcttgtgcccagttaacttaatgcactgattcttctcttaaaaacagctattgaattcgaatgtggattataagaaatagattttaagggtatatgtatgttttccttcattttcttaaaaaactggataggaaaagccttaaacacagaaagacacacacacacactcacttgctctgctcaaaagtttaagaccgtctatgaaggacagctgtttataccagacaacacatatgtccgggctcacaccctcaagctgactcagagacagacatgattcaaatcatagtattcaagtaccttgaatactgttattcaaggtattattattccacttcaaatacaacttattttcccctatcgtgtccaacaatttcaacaattgttgaaatttcacactttgagaggctaaaactagaggatcacttgagaccaggagctccagacttgcctgggcaacaaagcgagaccccatctctacaaaaaataaattgaaaaaaaaaaaaaaaagaaatttcagtgtttttaaacaccataaagatttttataatagaaaaaaaagcaggatacaaaattgtacatacaatgggctgttatgtttttaaaatattttaaaatatgctcagaagaagaagagaggaaatatgccaaaatgttagcagggtaatgttggagggatagaattatgagtaaactttattttctcctttatactgttctgtatgttctaaacattttatcttttttattaatatttttagttatgaggtaattcaatcttacaaaaacaatgtgacaggtacatatgtacccaccatcagactagatgttaacattttgccagattggcttcagatatcttcagtgttttttgagaattgtgttttttatatatgtgtatatatatatatatatatataacaacactgccctgccccctacctcttaattttcccctcctttctcctcagaagtgtttatcattcccatgcttttttttctattttcttttgagatggagtcttgctctgtcttccaggctggagagctgtggcgcgatctcagctcaccgcaacctccgcctcctgggttcaagcaattctcctgtctcagcttcccgagtagctgggattacaggtgcacaccaccatgctgggctgatttttgtatttttagtagagacgaggtttcaccatgttggccaggctggtctcgaactcctgacctcaggtgatcttcccgcctctgcctcccaaagtgttgggattacaggcatgagccaccaggcccagcccccacgcactatttatgcttgtactatttatgtatgtattcataacaatataaaattgtttttatgtgtttttaaaatttatgtaaatggtatcctattgaatagatccatttgcagtatgcttttctttcatccaggcttgtatttttgaaattaatcagtgatttacatatagagagtattcattttaattgttttatggcattttgttatatgaattaactacagtttcttcatccattcccatactgatggctggtttagatttttttttttcagttgttttgtcattgtggacactgctgcaatgactgtccaagaattgtgtccctagcacatgtgaaagggataactagaagtggaattgatggatcaaaggtagttttatgggatattgaaaaattgtttcgttgtaagtgtaccaagttacactcctacaagcagcaaatgagaggtttttgttttgttttgttttgtttttgagatggagtcttgctctgtcaccaggctggagttcagtggagcgatctcggctcactgcaacctctgcctcccgggttcaagcgattctcctgcctcagcctcccaagtagctgtgactataggcacgtgccaccaagcccagctaatttttgtatttttagtagagacggggtttcaccatcttggccaggataagctctatctcttgaccttgtgatccgcccacctcggcctcccaaagtgctgggattacaggcgtgagccaccatgcctggccgcaaatgagagatcttgtttccccacatccttactaatgtgtgccattattagcattttaaatattttgccttcgattcattggatgtttcccaccttgtatgggtgatcatcctttcataattgtattgattactcaggttttttttttttttttttttgagacagagtctcattctgtaacccagcctggaatgcagcggcgtgatcttggctcgtagcaacctctgcctcctgggttcaagcgattcttttgcctcagcctcccgagtagctgggactacaggctcctgccaccacgcccggctaattttgaatttttagtagagacagggtttcaccatgttggtcaggctggtcttatactcctgatctcaggtgatccgcccacctcgggctcccaaagtgttgggattacaggtgtgagccaccacacccagcctcaggtttctttatagtgatctgcctggccgttcctacactttgcccatttattgggttggggttttggggtttttttaattgatttgtaggtactctttgtatattcaggatactaatcctttaatggctgtgttacttttttggagggttgtattacttttgcaatcactgaaaaaattagtttttaaagtagattcatgggctgggttcagtggctcacttctataatcccagtgactcaggaggctgaggcagaaagatggttggaggccaggagaccagcccaggcaacataatgaggccctatctctaaaaaagtaaataataaaaaataaaatggattcaaatttattttttcctctgaatcctaagcttatggatatgctgtatctcttccagctgctgaaatgaggcaaaatgacaaaatcatgtgcatattggaaaaccggaaaaagagggataggaaaaatctctgtagggctatcaatgacttccaacagagctttcagaagccagaaactcgccgtgaatttgatctgtccgaccccctagcccttaagaaagatcttccagcccggcagtcagataatgatgttcggaatacgatatcaggaatgcagaaattcatgggagaggatttaaacttccatgagaggaagaaattccaagaggaacaaaacagagaatggtctttgcagcagcaaagggaatggaagaacgcccgtgctgaacaaaaatgcgcaggtaatgaaacagaagagacgagctggtctcaacgctctcttcaacaaaccaaccctacagtttttttttttttttaagcaaccctacagtttttttttttttttaagcaaccctacagtttttgtgggatttgtttaaagtcctaccaatgtgcacagacagccacatgctactttggccctgtggggaaagaaaagtcagagcctgccctccaggagggaaacacctgcaatgacacctcagtcatgtggaaaacactttccgtgtcggggtcccagttggatgccggcgtgcagaggtaactcagaatcggtccctgccctcccagtctgcggggaaggtgaatgggaaagatgcaggtcttcctgagtctcttgggtgctgtggtagaaattcctacaggggactttgggggtgtagttgcaggcatggtggtcacatgccctcaccaggactccccaagcccagggaacctcttgggcaaaggctccaaggcatgaaacagcctctcattgagggaactgcagaaagccccatgtgtcctcactgaggtcagcagcattctgctctcccagctcctcttcatgcctgcactcgagcagcactgacccgcccagccacttctgtgccggaaagaccgggtaacgaagacgacaacatccctgctctcttggggtgtgtcagcgggtgatggaatagtgaggagctatgaggaagacaaaacagggaccaggcacagagaggaatgcactccgccttcttgagcgcctcctctctgcttgttagtttgcagtctccttgctcggcccatcctcctccaagcctcttctctccccagtctactctccatgagtgatgtctccccagatcatcttctcccattcttctcccactcctaccagatttatgccctccctgctccactggaactgccctggccaacctcaccagtgacctccatgtcgcccaatccaaggtcggtttttgaccttcatctggacctaacagtcgatcacctcctgctcctggaaatgcgcatgcaattcagctttcagaacaccactctcacattagctcccttcccatccaggtcctttgttggtttctcatctgctcaacctctggatgttgttcacaccagtgctctcctctaccagctaaactcacccgagtgatcttgtccggtctcatggctttaaatgccacctataggccatcatttcccaggtttatacctccagcctggactcttccctgaatccagactcataaattcatctaacttctcttggatgtctaatgcacttgtcaagatcagcacgagtccaataactctgttcttccctgcagacctgaccttctacccacatccgtgacagctcctttcttctagctgcccaggccccagcccaggtaatcttgactccttcctttctctccatttttcagctactttccacaccctccaacattcccattctgaactaaggctatcagcatctctcggctgggcgcagtggctcatgcctgtaatctcggcattttgggaggctgaggaggaaagatcacttgaagccaagagatcaaggccagcccgggcaacaaagtgagacctcatctctacaaaaaattaaaaagttagctgggcatggtgtcgtgcccatgtagtcccagctactcaggaggctgaggcaggaggatcactgagcctggaaggtcaaggctacagtgagccgtgattgtgccaccgccctccagcctggccagcagagtgaaaccctgtctcaaaaaaaaaaaagaccgggcacagtggctcatgcctgtaatcccagcactttgggaggctgaggcgggcagatcacgaggtcaggagatcaagaccatcctggctaacacggtgaaaccccatctctactaaaaatacaaaaaattagccgggagtggtggcgggtgcctgtagtcccagctactcgggaggctgaggcaggaaaatggcgtgaacccgggaggcggagcttgcagtgagctgagattgtgccactgcactccaccctgggtgagagtgagactccatctgaaacaaacaaacaaaaagcatctctcagctgctctttgggtctctccccttatcctacagagtaaacatttcactcagagtaaacgatttttttcagagacctacaacgccttcacagtctggccttatctcctgctatgctgccctctcactccattctttccacactatcttgctgttttcagacgtgagtatatcaggctcacttctgcctcagggcctttgcatgtgctgttccctctgcttagaaatgtctttccccagatatctgtagggatcaccactctcctccagggctgtgctaaagtgctatcttatcagtgaggcttcccctgacccccctattttaaaccctgtaccctcctcccaccccacattccgtatcctgttgcttaatttttctccatagccttgatcactgacgtgttgtatggttcatccatctcccaagtggtctaaatttccacctctggccaaaaggctttgtttcagctgtggacttggttcttcagcagtctccttgacatctcacaggacccttcacaacatgtcggaaagcagccctggatcctcttctgcatctgctcctttttccatctttctcctccaactaactggtacctcctgcccttaaaccagaagtctagggaatcatccatgacccacccctgactccaggccatctctgactcttgtcccttctacctcctgcatatattttgaactgtccgcttgtccccatccctgctgtcacccttgtgatgcaagccaccatctcagctgaacagacctctgccaagatctttctgatggcctccacttcctttcttgcccctctctggtccattcccaaaacagcagtcagtgatacttttaaacaatgtggagtttggccaggtgcagtggttcacacctgtaatcccagcactttgggaggccgaggtgggtggatcccctgaggtcaggagtttgagaccagcctggccaacctctgcctcccaggttcaagtgattcaacactgttcttactttgggaggccaaagtgggcaaatcacgaggttaggagttcaagaccagcctggccaacatggtgaaaccctgtctctactgaaaatacaaaattagctgggcgtggtggtgcgcgcctgtaatctcagctaccccggaggctgaggcaggagaattgctggaacccaggaggcagaggttgcagtgagccaagatgcaccactgcactccagcctgggcaacagagcgagactccatgtcaaataataataatactattattattattaatactattattaataataataattaaataattaattattatttaaatgccacctataggccatcatttcccaggtttatacctccagcctggactcttccctgaatccagactcataaattcatctaacttctcttggatgtctaatgcacttggatgtctaattaattattattattaataatagtattattaataataataatagtattattaataatattaataataataatagtattattaataatagtattattaataataataatagtattattaataataataatgttattattctgcaaaggaggtatgtcctgcttcacaggtaaggacacaggctcagcaaggctaagtaatagttgaggttaacagagctcggaaatgtctgggctgggatgtgagcctcctctgactccaaatcttcacattttgcttttggaccttctaccttgaccccttcacctcctactcttcctctttctcttactcattggcctgaccaagtcctcctgccactccacagtatctgtcatctggccccacttcctccatagagtcctgtctggtttcttgctctttcacttctggattcccctgaatcctttcccaaaacctctgcacctgctcccaacccacttcttttgtcctgcaggtctcaaacgtcatttcttggggctgtagagtatctcttgcccactgtaaggatgtagctgcctcaggatagagcaggacagcaaggggcacaccaccagcctgtcccaggaccccagcatagtagtgatcactagcactcatctgggagcttgactctcccacagccttcagaggcaggtcctgtcattattgttcccgtcctcatgctcatggctaaggacgtggtaggaggcaaaggcacgaacggccacacgtgggaaggtgctcctgtggccaggtcgatctgattgcttcttgcctcctttcagaggccctctacacagagacaaggctgcagtttgacgagacagccaagcacctccagaagctggaaagcaccaccagaaaggcagtttgtgcatctgtgaaagacttcaacaagagccaggtataggtactccgcgacctcgggctcgacgactggaggggaggatgagcccactacggcttcccaaggctctccggcttccctgggatcccagtctcagcctgctccctggtcacatgaccggccctgacagagaccctgatgggctgcctgatgacagagatggatgagacccagtcctgtgccttagctctgaatcttggagggaaacctgccaaactagccatgtaacctggggaagtcagctcacctttctacacctcggtttcttcttctgtaacatgaggatggtgacatccacctagactgttaccgcctagctctgctccactgcctggtgctggtttccattcttcccacctctcagacttcccctttactgagaacagctacttggatgctcaccgatggcagggatgatgaagaagatcataatgagctcgaacactggggcctcctgagacctcccacctcctctctaaactctggcccccctcctcccacacactcccctcccctccaacctgatgctgaaattgctgaaataggttcttctttttgtttctttggtttttttgtttgtttgtttttgagacagggtctcactccatcacccaggctgaagtgtagtggcacgatcatggctcaccgcagcctcgacctcccaggctcagatgatccccccacctgagccatccaagtagctgggactacagtcacgcgccaccatgcccagctaatttttgtatttttttgtagacacagggttttgccatgttgcccaggctggtctcaaactcctgagctcaagcagtcctcccgcctcagcctcccaaagtgctgggattaccacatctggccctcttttcgttttggaaattagagctcgcccccctgcctctccctccccccacaaggttttcttttcgaatgcaattctgttttctggtgggtggggactttgcctgggttcattgatcaggttcgctcgtcaactagaactatggtccccaaagaaggctgtgcaggatctgtgggagagcagataccagagccctgctttatattcatttttaacctcatcacttttgatttccatgtacatgtgtagttataagcatgtgctatcattaaggtatagtagtaccatgctgtgaactaaatatattggagatacaagctcaaaactgtcctggtggaggcaggcagtcaaaaatcccagagaggctggaccagacaccagagaatgtgggttttcaacacgggggagaggaatgaggagagccaactgcgggggctggggaggaccaaaaggcaaagcaagacacctgaagtccgagctcaccacccagtgagctgcaaaggtcttagagatcatccatccctgcccttcattttacagagggcgaccaaagaggggaggctgtttgctccagtccccactgcaagtgaatggcaggatgtggggcccttgacaattagtccactgttggctggtgatctgctcattcatttatggaagcgatggtgatgatgatgatgataattcactcattcattcatcaattcaaccaatgtttattgagcccttcctgctgggcattggagtggcttttgctaaaccctattgtctcattcatcaatttattcattcatatattctagaagatgtttaatgggcatccacagcctgcctggttttctcagacccccggctcctcacgtggatgccacgaggcagcaccattgcaaacactcctgcactgggaaaagccgccctctggcttctgcagctctgctactaactacaactaggctttttaattaacctgggatgttaatccaaagcccaagcaggccggtccagttcaacaggaaggacacacgtgagggcctccagttcttgggtcggggctcatttcgtcagagaggcattgtggcatcagggtgtggcacgcaggctctggagcccgaccacacggggtgcagaccaggctctgccctgcagccttgggcaggccacccactgcgtccatttgatcatctgcagaatgaggaagcgacaacaccctcctgtgtcggtcagaatgtgctaacccttgctgggataagaagcagcagtctcagtggcttaaacagaaagttgatgttccatgcatgctccctgcccgccatggacaggctgtgaggcctgttccttggcatcctcactttggagcccaggtcctgggatggagcgaccgccagccagaggatccctgcaggaggagggaaggaatgtggctagtccccgcaggcttcctcccaggagcagtactgccacctctgctcacatttcttttttcttttttttttttttttttgaggtggagtcttgttctcttgcccagcctggagtgtgtagtggcgcgatcttggctcactacaagctctgcctcccgggttcacaccattctcctgcctcagcctcccaagtagctgggattacaggcctctaccaccacgcccagctaatttttctatttttagtaaagatggggtttcaccatgttggccaggctggtcttgaactcctgaccttgtgatttgcccactttggcctcccaaagtaagaacagtgttgaatcacttgaacctgggaggcagaggttgcagtgagccgagattgtgccactgcactccagcctgggtgacagagcgagactccgtctcaaaaaaacaaacaaacaaacaaacaaaaaaaaacgggtgtaggggcttggaaggatgagctgacttccttagggagtactcagtggcaagtccggtattgaagttgggcctgtctaactacaaagcttgtactgtgtgactcaatcaagctggcctctggtgagcacatgtgggaggccggctccttgcaaactgccctgtccatgtgttactgaggacaactgtaaacccaagtacatgtctcctaagccatctcctgactttacagagaaatgactgcagcccagagaggggaggtgacttggtataggccacatagccagggaacccccagggaatcaaacagaaatgagacctggaattactttgtactgggggctgcagctcaggaccactgaagtgacagtgcattttctaccactgttgtcaatcactctgttgagcgttctttgcagcccacagatgtccaagggttgccaggggcatagagccctgccttgggtgggaccaggcccacgcggggtgtcggcctaatccaaggagggagttccctgccttggtaagttggtgcaagacccggagctcttatgcatacacccaacaggtggtgatcccccgagtccagcccacccgcccagcagtgcgcaggcagccaggggttcaaggacccacccacatccgtgcctgacaagtctcccctccacccgactcctgctgcccttagcatatcctcccctcgagggcccccagtgagatttgctggcctgggtgtcagaatgcccctggggtcactcggaccatcttctttaatgtcttcacctgcttaggccatcgagtcagtggaaaggaaaaagcaagagaaaaagcaagaacaagaggacaacttggccgagatcaccaacctcctgcgtggggacctgctctccgagaacccgcagcaggcagccagctccttcgggccccaccgcgtggtccctgaccgctggaagggcatgacccaggagcagctggagcagatccgcctagtccagaagcagcaaatccaggagaagctggtgactgccccgcccctttttccagagcccatagagccaggctctttgctcccactgccttccaggcacaaatgtagttgtagcaggccttgtgctctgccctagcacctgccctcaaggagtttcccttctagtcggtgggagacaagagccagatagtgtcacacccgtatgatgtggcattaggagtaggagtgccaagatagaggacagtagaatgggaagacattgaagcaaagacccaaaagagggtagggagggagccatgtgtctacctgggaaaagggcgaccgggcagggtgagctgcaagggcaaaggccttgaggcaggaccctgccagacctgctcagagaagggcgtggagcctggtgactagagtggagtgaggagaggggcaggtacggaggcctcagaggcagacggtcgaggtcctggcagtccactggggaggactttggcttcttctgtgacggagacggggaactctgcagggttttggacagagaagtgacaggatctgacttaggttgaacaggatccccagcgtgatccccctggattgagggcagacactaggggctgagggggaaggaaggagatctccaggaaggcctttgcagtgttcacagcgagaggtgatgctggctgggaccacggggcaggcagtgggggtgctgagcaatggtcagattctggatctgttttgaaggtagagtcgacaggattggatgcatgattgggtggggacgtgtgaaagagaggagttaaaggcgactctaggtcctgtggcctgagcaactagagggatggaattggcatttccagagatggggaaggtggtgggaggagcaggttggtgggtggggaggggtggaaatcagagttacaattttggatacgtcaagtgtgcaaagtccattagatatctgtatctattaggattacatttgcctgaatgtggcagaaaaccacacataacagcatcttaaacaaaatagaactttctctcttgcaagtagactaaatcctcaggaaaacagtccagggctggtatggcagctctgtggtcattgactgatgtcctgctatccttggctcctggctctcacttcttagtgcaagatggctgcttgagcaccagccatcacatgcatagtccagctaccaggaaggaggaatggagaacactctaaggagatttccacttacatttcactggacaacacttagtcacaaggttgcccctaactctaaagaagtcaaggaaatgcgtttattccagacagtgaagtgctggtgattgttttactaaagaagaacgaaaaatggttactgggagacaagtagtattttctgccacaatctccaattaaagcccaggaggcagctggatatgtaacatagggctcagaacaaggtctgggccagaggcataaatgtgagtcgtcacctacagagagaatgtatgcatgtattttgagacagtctcactctatcaccctggctggagtgcagtcatgcagtctcggcccactgcaacctctgcctcctgagttcaagcgattctcctgcctcagcctccccagtagttgggattacaggcatgcaccaccacacccagctgctttttgtattttttgtagaggtagggtatcgtcatgttggccaggctggtctcaaactcctggtctcaagtgatccacccacctcagcctcccatagtgccgggattacaggcgtgagccaccatgcccggccctacagagagtatttaaagctgaggactgagtcctgctcccacctccccagcaccccccttctcaccaccactgttgataaagagcaaaggcatctgagaaggggccgccagggaggtggacagatgcaagccgtggtttcctggaggccaagtgaggaaaggtgtttgggagggaaggagaggggaacccctgggtcaaacgctgctgccatgctcaggctaaacgctggatccagcaccatggcagtcaccagggaccctgtcaggaaggagcatgtttggcagaggagtggggctgccagcctaatgggctcaagagagaacaggcaggaaacgaatggagatggcacatgcagacagcacttacaaggcgtttgctgtaaagggtgcagagaaatggagtaggagctggtgggggccatgaggtgaagggaaagtttttgtttgtcttgattgtagaaataacagcatgcttgtcattcagccggagtgatgcagtagagggggaaattgatgccagaggagagacttgctggagccgtgtccctgggctgcaggagagcgagggacatggagtgctagttgagggcttggtgtggcctctgggagctcagagccatcactggagtcacgggaaggggcatcagggcgggagcttgcgggtgaacagaattgagacctgagttgatctgtactgggggctgtggctcaggaccactgaagtgaccgtcattttctaccttttagaagtagaactgagcagggccggggggagttagtgctaagtggtcatctagaagagctggagagggaacagcctggaggaaggggacaggatggtcagacagtgcccagggcccactagggggtcatagtcagatgactgggtcaccccataggtctgggtcaccccatagtctgggtcaccccagagagcactgtcagggtgtcccccaccatgcttagccagattcattgtggtcaccgcctgcctgatcaagtgaaggactcagggggccgagggtattggcctgggagcatctgccatgagacgaaccagggggccagagagagattggaaaagtggcggccagcagactggaggtcacactttgcggggggcataatcattggaatcagggacttggagagagagtggaagagacaggttagagcagtgagactgttattggtaatgacaacggaagggtggagggtcccaaagggagggtctccggacccacagcatcggccgggtggggcctgcagtctgtggtttcgaaagcccccaggggattctgatgcctactcaagtttgagaaccactggtagggtgtgcccagtgggtgagaaggtgaagccgggactagatctttggagaggaggcaggagagctgagcagctggggacaagagagggctgtctctgtgtgtgctgaaaccactgagaatcctggcaggagagatctggagagggtctcaaacctgcaaagagtgggtggaagaggccaggctggggtggcaggtgccatagttggtgtaagcttctgatctggtgggtctggggaggaggagggacagtggcggtggcgtggaccagggcatgaggagtgggtggggcagctcgtccacctgcttccctgcaggccagaggtgcacatgtgtgggaggctgcagtggggccgggacctgggcaggcagggggcgtgaagttcaggaagtagtccaaggtggaaagggcgccggggctggaatgggggtccagggccctgctctgtgcttcaggactgccgctctgcctggaccatctggcacaggagatcggccggccatcctgaaagcagtattgctgtctagttttcattttttgtagaaaattaagaagacagaaaagcacaaagggggaaaaacacacatgaaacctccccactcagaactactgcccgcttcctttctgggtccttgcctccatccccttttctatgcttggaggtaactgggaaagttgagatctcacctcaaacagctgggctgtctgctttgctcttagcccgggtgagtgtgtcccatgccattccctgtttgccaccaagcagcttgtgtgatgaccctgggctcctgagagcagcctggctttacagcgggggacactgaggttcatgagagcagggtgacttgcctcgtgggtgacaaagcccgccagcctgccttcagtcccaggatggggccgcccagacccccgtgccactcaccggacacatccttgcttatttggcgggaggaggctctgccctaaaaatggcaaacgtgggcaaaggggactcgtcttcagccctaacaaagctgacaacacacggggaagtaccccttcctccacacaaatccagcttcctcttccagggctccagagttttcacagtgaggagggcagtgaggaatgagctgaaacatagcaactcaggggttggggtgcccctctaggaccataaccttcctgtcaccgggtgaggctgtggtgtctgcatgttctggaagctgcccaggtgatctgcgttcagctgtggggcagccggccatggctcatggaggtggcatctgacagctgactgagccagggagccccctgaggacctgagaaggaagactctgggcccagcctgcacctgggagccctgcaccccggagctgggagtggaggctgctgtaggaattgagtccctgctgtgcctttaggagaaggaggacggccagcacctcctgacgggggagggcagctgggccacatggaatgagggcaggctgggggtctcctctggcttcctgcatgacatcggtcacctacctgctcgtcctctgagcctcagtttccccatctgtagaatgagaggccaggcctcctagataatcccctggggttctttggctctggggaaaggtggtggtgagccgcctcttttccttccagaggctccaggaagaaaagcgccagcgagacctggactgggaccggcggaggattcagggggctcgcgccaccctgctgtttgagcggcagcagtggcggcggcagcgcgacctgcgcagagctctggacagcagcaacctcagcctggccaaggagcagcatttgcagtgagtgctgggtgggaccagggccaggtgggggaccgggtggagggaccgcggggctgtggaggtcaaggacgaggagggggcaggaggggaaacaccccgccctggtggtcctcatctggacactgtggacctcaagtgggctggcttgggttgacagacccatgggccacaggtcactgctgtccacacggggtgcatgggtggagggcaccggaaagccccagggaagagcactgagtctgctgggggagtcaggaaggcttcctggaggaggcttcattggtgagacccaggaggaggatggcactgcctattcagggacggctttccaggtagagagaggggctcctgggctgccccagaaaagcctggagtctcttggttatagacaggactccaagagttcagagctccagctacaagaagatgtcaaatgcaagcaaacaggtgaacttgcacctgaaaaacacagtatttatttacttatttatctagctcttggcttaaactcaggggggacccaggaatattttctccaatccgatatctggttgcttgtgggtccatctgttatcacttctgctgaaggcctaaaaggagcattaagagtgatctgagggctgggctcggtggctcacgcctgtaatcccagcactttgggaggctgaggcgggcggattatgaggtcaggagtttgagaccagactggccaacatggtgaaactaaaataaaactaaactaaaaagacaaaaattagccaggcatggtggcacacagttgaaatcccagctactggggaggctgaggcaggaggatggcctgagcccaggggctggaggctgcagtgagcaatgatcgcaccactgcactccaccctgggtggcagagagagatgttgtctctaaaaacaagaaaagaatgatctgagaaatcaaacagggtgaacacccacggagatttaattttcttatgtccccaaatgttactggtgtaagtccctaatctaactgcagtgtaattaaaaagtgaccctcgccgctgaggagcggttgagatggatcattttggggggctcattaggtatgaaacgtattctgtattttggggataacacactaataaaaagtttgtgtgccttttcaaaaaaaaaaaaaagaaagaataggaagtatacacatttgctgaccttttttttttctcattttgttatcaggaaaaaatatatgaatgaagtctatacaaatcaacccacgggagactatttcacacaatttaatacaggaagtcgataatgaggaacacacccttgttcccgtcattcacgtataaagagtggctaccttaaagagtc

SEQ ID NO: 1683 - DNA, 437 bp, Homo sapiens
aggctcaggccacccaggggctgccaaaagggaggcaaggctttgcagacagactttatgcctccctctggatccaggcccacacgggctcccaggcaaagcatttgaacaaatgaccacactgaagacgttgttcaaattcacagtcgatcaagtaatgctgccacccccaggctggtgtgggaccacgggtgggacccaggggactgcctcaggacctgtaactagagtgtggattgtgatgtaaagccagagaggggagggcgagagtcggtttgttagcacgccctgtgtaccaggctcccactgggcctcttgggcaggtggtctctttaaactgcccccatcgcaccgctggaaagcagctgcttagcctcgttttgcatccacaaaatgaaggacctcactgttctcactgcaccaggcagggccaccat

SEQ ID NO: 1684 - DNA, 175 bp, Homo sapiens
ggaatgacctcttccacacaggagagggtctggtgggaccaccattcgaggccctctctccccacctgccccctgcccctgccacccacttgcaggtaagggacaggctcctacgcagcctggtcagtcactgctccctcctggagtctggctattgaaaagagggacaaagaaa

SEQ ID NO: 1685 - DNA, 556 bp, Homo sapiens
cccagagcctcagggtagtaactgatttgcatataatgatatgtctacgtaaaatgtgtagttgtaataaatacaaacaatggtgggtttaaaaaatttttttttaaatgcacctctttcttcccgtgctggatattatcatttactgggtacttactacactctggcactgtgttcaatacatttaaaaaaaatttacatttggtttctttttgttttaaaacagcaacctacatcagctatcctcataaggatggtcaattgttccagaaacagaaggaatttatattaggtccctgcttttccacatatattgtaaatgagtacaaaggaggtacagctttgggatggaaagacttccgggggtttctgcatgagggaaaatgggccttatgcacttaaaatattaacaatcctaaggagcttaaagggatttgcacatcacaaccttaaacaactttgttagaggtctatttccttagtctaaaattagaatttgtctctaatgagctcttcctacttaagggtccagattctgttctttcctgccaaccag

SEQ ID NO: 1686 - DNA, 558 bp, Homo sapiens
cccagagcctcagggtagtaactgatttgcatataatgatatgtctacgtaaaatgtgtagttgtaataaatacaaacaatggtgggtttaaaaaatttttttttaaatgcacctctttcttcccgtgctggataattatcatttactgggtacttactacactctggcactgtgttcaatacatttaaaaaaaatttacatttggtttctttttgttttaaaacagcaacctacatcagctatcctcataaggataggtcaattgttccagaaacagaaggaatttatattaggtcccttgcttttccacatatattgtaaatgagtacaaaggaggtacagctttgggatggaaagacttccggggtttctgcatgagggaaaatgggccttatgcacttaaaatattaacaatcctaaggagcttaaagggatttgcacatcacaaccttaaacaactttgttagaggtctatttccttagtctaaaattagaatttgtctctaatgagctcttcctacttaagggtccagattctgttctttcctgccaaccag

SEQ ID NO: 1687 - DNA, 348 bp, Homo sapiens
gcaatgcccacacgggtggctgagatagtgacacttgctttcagatggttcaatgtatacaaactgtgtttcatgcaaaacattattttaaatattgtataaaataactttcaggctatgtgtatcaggtgtatttgaaacataaataaatgtcctgtttagatttgggccccatccccttatatctctcattatgtacatgcaaatatttcaaaatccaaagagcatctgaaatccaaaacacttctggtcccaaatattttggataagggaaacttaacctgtacttcttatcttaaaagtttatttactattcaattaatttttacctcattttcctatgatttt

SEQ ID NO: 1688 - DNA, 348 bp, Homo sapiens; identical to SEQ ID NO: 1687

SEQ ID NO: 1689 - DNA, 348 bp, Homo sapiens; identical to SEQ ID NO: 1687

SEQ ID NO: 1690 - DNA, 348 bp, Homo sapiens; identical to SEQ ID NO: 1687

SEQ ID NO: 1691 - DNA, 1577 bp, Homo sapiens
ttttgaatattttctttattatctcattgaacttcagaatacttgtatcaactccttcgatatttgtatcaatttccattggatttttaaaatcactattgaattagctctctaaattaagttgagagaagttgttatttattgctggctgggcacagtggctcgcacctgaaatcccagcactttggaaggctgaggcaggctgattgcttgagctcaggagtctgagaccactatgggtaacatagcaaaactctgcttctacaaaaaaagtataaaaattagctgagcatggtggtgcatgcctgtgggtccagctacttggaaggctgaaatgggaggattgcttgagcctaggaggtcgaggctacactgagcggagatcgcaccactgcactccagcctgggtgacagagcgagaccctgtctcaaaaaagaataagttattatttctataattttaattattacacattgaaatgtgctttttctgcaggagaaatttcaaactacaatttccagtatttgatgatttgttggctcttggattaaagaaggaagagtcaaaatgtttctaaggcttggggtctgagagactttgggactcagaaaagcttcacaggagccaaaagagcattgctaagtgttatcagaaagaagagggaagatttttcagtgttactcttaagggcggaaaaacagccaatgtctcaaaattcccaggagacagatttagccatacataagaaattattttacataatagagctctccaaaaatgaaaaaaatgctgctgtgtgaggaggcaagcctttcatctctggaagcattcaaactgaggatagattacaagtaagtgtcaataagacagccctcttatttctaatagtctgtgttgagtttattctccaagcgggggtgaccttcatataactgaaacaagtgactagaactcatgaagaagagcagggttaaggacaacactttaggtgctgctcaagaaaagaaaaataggccaggtgccatggctcacacctgtaatcccagcactttgggaggccgaggcgggtggatcactttgaggtcaggagttcaagaccagcctggccaacatggcaaaaacccgtctctactaaaaatacaaaaattagctgggtgtggtggtgcttgcctggaatcccagctactcgggaggctgaggcaggagaatcgcttgaacctggaaagtggaggttgcagtgagctgagatggtgccactgcactccagtctgagcgacagaaggagactccacctcaaaaaaaaaaaaagagagagagaaagaagagcccaaaggggagagagagagagagagagatagaaaggatgtgaccagtaaaataatattataagcaccaggaaaaagttatagaatcatgcatgacagtggaagaccaaggaaaggttggctaatagtcaggtgccacaaataagagaagtacagtaaggccaagcaagttgtgagaggacttggagagtgaagttccagtagatctgtgcaacagtgaaatgacacctaagtggcactacagagtcaag

SEQ ID NO: 1692 - DNA, 1577 bp, Homo sapiens; identical to SEQ ID NO: 1691

SEQ ID NO: 1693 - DNA, 1577 bp, Homo sapiens; identical to SEQ ID NO: 1691

SEQ ID NO: 1694 - DNA, 946 bp, Homo sapiens
tactttaagttctagggtacatgtgcacaacttgcaggtttggtacataggtatacatgtgccatgttggttttctacacccatcaagtcatcatttacattaggtatttctcctaatgctatccctcccccaaccccccaccccctgacaggccccagtgtgtgatgttccccaccctgtgtccaagtgatctcattgttcagttcccatctatgagtgagaacatgcagtgtatggttttctgtccttgcgatagtttgctcagaatgatggtttctagcttcatccatgtccctgcaaagggcatgaactcatccttttttatggctgcatagtattccacggtgtatatgtgccacattttcttaatccagtctatcactgatggacattcgggttggttccaagtctttgctattgtgaatagtgccacaataaacatacgtgtgcatgtgtctttatagtagcatgatttacaatcctttgggtatatacccagtaatgggattgctgggtcaaatgataattctagttctagatcctctaggaatcaccacactgtcttccacaatggttgaactaatttacactcccaccgacagtgtaaaagctttcctatttctccacatcctctccagcatctgttgtttcctgactttttaatgattgcatttctaactggtgtgatatggtatcccattgtggttttgatttgcatttctctgatgaccagtgatgatgagcacatcatcatgtgtctgctggctgcataaatgtcttcttttgagaagtgtctgttcatatcctttgcccactttttgatgtggttgcttgtttttttattgtaaatttttttgagttctttgtagattctggatattagccctttgtcagatgggtagattgcaaaattttctcccattctgtaggttgcctgttcagtct

SEQ ID NO: 1695 - DNA, 946 bp, Homo sapiens; identical to SEQ ID NO: 1694

SEQ ID NO: 1696 - DNA, 946 bp, Homo sapiens; identical to SEQ ID NO: 1694

SEQ ID NO: 1697 - DNA, 1577 bp, Homo sapiens; identical to SEQ ID NO: 1691

SEQ ID NO: 1698 - DNA, 946 bp, Homo sapiens; identical to SEQ ID NO: 1694

SEQ ID NO: 1699 - DNA, 380 bp, Homo sapiens
tgaagttctttcttcagcgtgttcaattctattgctgagagtttccagagccttttgcatttctataactgtgtccattgtttcctgaagttttgattgttttttatttatgctatctatttcattgaaaatctctcccttcacctgttgtatcatttttttgatttccttaagttggactttgcctttcactggtgccttcctgattagcttaataactaaccttctgaattctttttcaggtgaaacagggatttcttcttggtttgcatccattgctggtgacctagtgtgattttttggggggtattaaggaaccttgttttgtcatattactagagttgggtttctggttcctcctcatttgtgtagtgtctgtc

SEQ ID NO: 1700 - DNA, 104 bp, Homo sapiens
cttttttatggctgcatagtattccatggtgtatatgtgccacattttctttgtccagtctatcattgatgggcatttgggttggttccaagtctttgccattg

SEQ ID NO: 1701 - DNA, 479 bp, Homo sapiens; identical to SEQ ID NO: 379

SEQ ID NO: 1702 - DNA, 478 bp, Homo sapiens
cccctactccgccctaatgtacaaagcaaccgataaacacatgcaaacttgaaattattgcagattgtcggagccctacaaaaattcagccctgttacttaaaacaagtcaagaaacccaaatgtataagaagttgatgttttaatggacagagaactctgtgaaaggcttttagcttacaagttggtggaatgtagtatcatttaatgtccttgtactttaatattcgcaaatgtcatttctgattacagaatacagcttctctccagtcccctgattcatattatagaaagaacaccaacttagtctaaggaaaattgaaccctcccaactgtatttgaacccatccttctcgctaacaagtgtcagtcaaaacagagagaataactaacatctaaatcttggatatgtcttatttgtatttcatttttgggcttacagttatgatcaagcagctattcttgtttcttttctgaaa

SEQ ID NO: 1703 - DNA, 250 bp, Homo sapiens
ggcgggtggatcacctgaggtcaggagctcacgaccagcctggccaatgtggtgaaaccctgtctctactaaaaataccaaaaaattagccgggcgtggtggtgtgcgcctgtaatcccagctactcaggaggctggggcaggaaaatcacttgaacccggcaggcggaggttgcagtgagccaagattgcgccaccacactccagcctgggcaagagcgagactccatctcaaaaaataaaaataaaaa

SEQ ID NO: 1704 - DNA, 568 bp, Homo sapiens
agtggaaatagtctagtcaccagtccctaagtgctgatttgtggaccagttgctgcaggtctcaattcccaggaggtcccgtcgctggagattctgatcaagtagattgcacagcactcaggaatcagtcattgtataaggaaatccccaggagactctgatgcatgactacctttgggaataggctctctgggttttacaaagccattttctgtaaaactataatttgaactcattttcgttggatgtggaatgcagtttggggattgataagggcttagttcacattggaagaaaatcagaattatagagtaattataaagagatgtaattaaaatacaaataccaatctcactaatgtaaactaaggttaatgttgccaaatacgactgttttaatgaataaattagcacgtgaattatatactagtaaatactgctaaagtagcataaaagtgcttgaaaacactgtttccttaggctgaacagtcaccttgaaatcttgtcgatgttccaactgtgcttaaaatgaagctgcatggttacttttcagcccagttcaagacaca

SEQ ID NO: 1705 - DNA, 568 bp, Homo sapiens; identical to SEQ ID NO: 1704

SEQ ID NO: 1706 - DNA, 114 bp, Homo sapiens
tttttgtagttttagtagagacggagtttcaccgtgttggccaggatgatctcgatctcctgacctcgtgatccgcccacctcggcctcccaaagtgctgggattacaggcatg

SEQ ID NO: 1707 - DNA, 105 bp, Homo sapiens
ttttagtagagacggagtttcaccgtgttggccaggatgatctcgatctcctgacctcgtgatccgcccacctcggcctcccaaagtgctgggattacaggcatg

SEQ ID NO: 1708 - DNA, 983 bp, Homo sapiens
gctcatcactcatttccaaaatttatattttcaaagggaattttgtacagagctcctaaaaaaagggatcatgatgccagtgtattgcctcactgattgctaaatgaagaggactataataaagcattcaaagaacaacgtgacatgcctctggggcaactgaaggattgctatctgacttatgcatttaaaaccttcgaagtggaagtttgtctggaatggcttaggcaaacagactgggttggattgagaattgaatgtatacataaaatttggtttgatcacatgagaacaccaaatgtggcagctagatcaccgttatttatgaaatttttattgggttgatttgccttgaaagaatcaaatctaagagaaatgtttggaatggctagatgatcctaacagaagaaatcttacaggtctttactgctaaacctaaggagatgagactaaacagtaagtggccaactcaaggaagcaaggactatgttgaaacatggactatagctgcaatttcccagtggtgcagttttcaagcgttttaccgcaggaaagaaaaaaataaataaatgaaaagtagccatttcaccattcagaggatagatactgttgcccagtgaaaactacatgaattatgtaatagttttatgcttgtttcccccactcaccattccaaaactgtaagagttcaagatagcacaggaggtatgaaattttaacagaacataaaaaaatagtgaacattctatccccgcacttcattgccattactaaggctaaggcaggactgagtttagaatgcagcaaagctttgaaatgtataaaagataatatctctaatattcaaatgctccataaactcaaaacttagaatcaatcctatttttaaaatactgaatgtgacaagaaacataaaagttttcaagatatcagatatgatagaaagagatgtattgctttagcacaaatcattctacaaaaaa

SEQ ID NO: 1709 - DNA, 1118 bp, Homo sapiens
tggatgttgaatggtggtttctttacatttaccagaatttctgccaaggtcctaatggccccaaataataggtgctacattatcaagcagatatatcaagagattgtgataatgttaatgaaacccctttgctcatcactcatttccaaaatttatattttcaaagggaatttcgtacagagttcctaaaaatagggatcatgatgccagtgtattgcctcactgattgctgaatgaagaggactatactgaagcattcaaagaacgtgatgtgcctctggagcaactgaaggattgctatctgacttatgcatttaaaaccttcgaagtggaagtttgtctggaatggcttaggcaaacaggctgggttggattgagaattgaatgtatacataaaatttggtttggtcagatgagaacaccaaatgtggtagctagctcacctttatttatgagatttttattgggttgatttgtcttgaaagaatcaaatctaagagaaatgtttggaatggctagatgatcctaacagaagaaatcttacaggtctttactgctaaacctaaggagatgagagtaaacagtaagtggccaactcaaagaagcatggactatgttgaaacatggactatagctgcaatttcccagtggtgcagttttcaagcgttttaccccaggaaagaaaaaaataaataaatgaaaagtagccatttcaccattcagaggatagagactgttgcccagtgaaaactgcatgaattatgtaatagttttatgcttgtttcccccactcaccattccaaaactataagacttcaagatagaacaggaggtatgaaattttaacagcacataaaaaaatagtgaacattctatccccgcacttcattgccattactaaggctaaggcaggactgagtttagaatgcagcaaagctttgaaatgtataagagataatatctctaatattcaaatgcaccataaactcaaaacttagaatcaatcctatttttaaaatactgaatgtgacaagaaacgttataaaagttttcaagatatcagtatatgatagaaagagatgtattgctttagcacaaatcattctacaaaaaaaaat

SEQ ID NO: 1710 - DNA, 1740 bp, Homo sapiens
attaccaatactgagttaaatattttaggactacttcattatctaggaaatttgagaagcaaattaactctttgctcagagtattgtgataccatatcttttcttgtaaaataagatattgtttaattataaaatattgtcaaatttctgaaaaagtgtttatataagtgttaggaatatgttagctctgggagccatgtgttacttatcattgtacagatcttcttgctgacacaactgggtatggtagacggcctgatatgattaactgcaagtaaagcagaaattattaaaaacaatattgaggccaggcaaggtggctcatgcctgtagttccagcactttgggaggtcgaggcaggtggatcacgaggtcaggcattcaagactagcctgaccaagacggtgaaaccccgtctttactaaaaatacaaaattaggtgggcatggtggtgggttcctgtaatcccaggctgaggaagataattgcttgaacccagaaggtggaggtggaggttgcagtgagtcgagatcacaccaccgcactctagcctgggtgacagagtaagacaacgtctcaaaaacaaaaacaaaaacaaaacaaacaaacaaactaaattaactggatgttaaatgtggtttctttacatttaccagaatttctgccaaggtcctaatggccccaaataataggtgctacattatcaagcagatatatcaagagattgtgataatgttaatgaaacccctttgctcatcactcatttccaaaatttatattttcaaagggaattttgtacagagttcctaaaaaaagggatcatgatgccagtgtattgcctcactgattgctaaatgaagaggactatactgaagcattcaaagaacgtgatgtgcctctggggcaactgaaggattgctatctgacttatgcatttaaaaccttcaaagtggaagtttgtctggaatggcttaggcaaacagactgggttggattgagaattgaatgtatacataaaatttggtttggtcagatgagaacaccaaatgtggtagctagctcacctttatttatgagatttttattgggttgatttgtcttgaaagaatcaaatctaagagaaatgtttggaatggctagatgatcctaacagaagaaatcttacaggtctttactgctaaacctaaggagatgagagtaaacagtaagtggccaactcaaagaagcatggactatgttgaaacatggactatagctgcaatttcccagtggtgcagttttcaagcgctttaccccaggagagaaaaaaataaataaatgaaaagtagccatttcaccattcagaggatagatactgttgcccagtgaaaactgcatgaattatgtaatagttttatgcttgtttcccccactcaccattccaaaactgtaagacttcaagatagaacaggaggtatgaaattttaacagcacataaaaaaatagtgaacattctatccccgcacttcattgccgttactaaggctaaggcaggactgagtttagaatgcagcaaagctttgaaatgtataagagataatatctctaatattcaaatacaccataaactcaaaacttagaatcaatcctatttttaaaatactgaatgtgactagaaacgttataaaagttttcaagatatcagtatatgatagaaagagatgtattgctttagcacaaatcattctacaaaaaaaaaaa

SEQ ID NO: 1711 - DNA, 1736 bp, Homo sapiens
attaccaatactgagttaaatattttaggactacttcattatctaggaaatttgagaagcaaattaactctttgctcagagtattgtgataccatatcttttcttgtaaaataagatattgtttaattataaaatattgtcaaatttctgaaaaagtgtttatataagtgttaggaatatgtttagccctgggagccatgtgttatttatcattgtacagatcttcttgctgacacaactgggtatggtagacggcctgataggattaactgcaagtaaagcagaaattattaaaaacaatattgaggccaggcaaggtggctcacgcctgtaattccagcactttgggaggtcgaggtgggtggatcacgaggtgaggcgttcaagactagcctgaccaagatggtgaaaccccgtctttactaaaaatacaaaattacgtgggcatggtggtgggttcctgtaatcccaggctgaggaagataattgcttgagcccagaaggtggaggtggaggttgcagtgagtcgagatcacaccactgcactctagcctgggtgacagagtaagacaacgtctcaaaaacaaaaacaaaacaaacaaacaaacaaacaaaaattaaattaactggatgttaaatgtggtttctttacatttaccagaatttcagccaaggtcctaatggccccaaataataggtgctacattatcaagcagatatatcaagagattgtgataatgttaatgaaacccctttgctcatcactcatttccaaaatttatattttcaaagggaattttgtacagagttcctaaaaaaagggatcatgatgtcagtgtattgcctcactgattgctaaatgaagaggactataataaagcattcaaagaacgtgacatgcctctggggcaactgaaggattgctatctgacttatgcatttaaaaccttcgaagtggaagtttgtctggaatggcttaggcaaacagactgggttggattgagaattgaatgtatacataaaatttggtttgatcacatgagaacaccaaatgtggcagctagatcaccgttatttatgaaatttttattgggttgatttgccttgaaagaatcaaatctaagagaaatgtttggaatggctagatgatcctaacagaagaaatcttacaggtctttactgctaaacctaaggagatgagagtaaacagtaagtggccaactcaaggaagcatggactatgttgaaacatggactatagctgcaatttcccagtggtgcagttttcaagcgttttaccgcaggaaagaaaaaaataaataaatgaaaagtagccatttcaccattcagaggatagatactgttgcccagtgaaaactacatgaattatgtaatagttttatgcttgtttcccccactcaccattccaaaactgtaagagttcaagatagcacaggaggtatgaaattttaacagaacataaaaaaatagtgaacattctatccccgcacttcattgccattactaaggctaaggcaggactgagtttagaatgcagcaaagctttgaaatgtataaaagataatatctctaatattcaaatgcaccataaactcaaaacttagaatcaatcctatttttaaaatactgaatgtgacaagaaacataaaagttttcaagatatcagatatgatagaaagagatgtattgctttagcacaaatcattctacaaaaaa

SEQ ID NO: 1712 - DNA, 575 bp, Homo sapiens
ttttttttttttttttgagacagagtttcactcttgttgcccaggctgtagtgcagtggcttgatctcagcttactgcaaactctgcctcccgggttcaagcaattctcctgcctcggcctcccaagtagctgggattacaggtgccagccaccacgcccagctattttttttgtatttttagtagagatggggtttcaccgtgttggccagactggtcttggatgcctgacttcagctgatccacctgccttggcctcccgaaatgctgggattgcaggagtgagttgccgtgcccagccacaaattttcttttaccttggaaaacatatatgcaaatatacttgtcaactatccgacaaaggtcttcggtatgtatgtatggattcattgaacattgtttctttttacataatgaatattttatgatttttagctttggttttttgaaatgaaccaataaattgaagagacacaagaagtaatgtgtgtgtaaataccagcatgcttagcccctcaaataaacctcttacaggtgtctgactcctaaatccaatttgacattttttcagaact

SEQ ID NO: 1713 - DNA, 574 bp, Homo sapiens
  SITE (13): n equals a,t,g, or c
ttttttttttttnttagagacagagtttcactcttgttgcccaggctgtagtgcagtggcttgatctcagcttactgcaaactctgccttccgggttcaagcaattctcctgcctcggcctcccaagtagctgggattacaggtgccagccaccatgcccagctatttttttgtatttttagtagagatggggtttcaccgtgttggccaggctggtcttggatgcctgacttcagctgatccaccggccttggcctcccgaaatgctgggattgcaggcatgagttgccgtgcccagccacaaattttcttttaccttggaaaacatatatgcaaatatacttgtcaactatccgacaaaggtcttcagtatgtatgtatggattcattgaactttgtttctttttacataatgaatattttatgatttttagctttggttttttgaaatgaaccaataaattgaagagacacaagaagtaatatgtgtgtaaataccagcacgcttagcccctcaaataaacctcttacaggtgtctgactcctaaatccaatttgatattttttcagaact

SEQ ID NO: 1714 - DNA, 574 bp, Homo sapiens
ttttttttttttttttgagacagagtttcactcttgttgcccaggctgtagtgcagtggcttgatctcagcttactgcaaactctgcctcccgggttcaagcaattctcctgcctcggcctcccaagtagctgggattacaggtgccagccaccatgcccagctatttttttgtatttttagtagagatggggtttcaccgtgttggccaggctggtcttggatgcctgacttcagctgatccaccggctttggcctcccgaaatgctgggattgcaggcatgagttgccgtgcccagccacaaattttcttttaccttggaaaacatatatgcaaatatacttgtcaactatccgacaaaggtctttggtatgtatgtatggattcattgaactttgtttctttttacataatgaatattttatgatttttagctttggttttttgaaatgaaccaataaattgaagagacacaagaagtaatatgtgtgtaaataccagcacgcttagcccctcaaataaacctcttacaggtgtctgactcctaaatccaatttgatattttttcagaact

SEQ ID NO: 1715 - DNA, 174 bp, Homo sapiens
cttgtatggcaaaaataaattaattttagctttgtgcagatatatcctattgagttacaaagtgatgctatcaaacaccattgacaacaacaaattcaggatttatggctctctttgtctctgtttctctctcctctctctctctgtgtatatatatacatatatgtatattat

SEQ ID NO: 1716 - DNA, 575 bp, Homo sapiens
tttttttttttttgtggagacagagtttcactcttgttgcccaggctgtagtgcagtggcttgatctcagcttactgcaaactctgcctcccgggttcaagcaattctcctgcctcggcctcccaagtagctgggattacaggtgccagccaccacgcccagctattttttttgtatttttagtagagatggggtttcaccgtgttggccagactggtcttggatgcctgacttcagctgatccacctgccttggcctcccgaaatgctgggattgcaggagtgagttgccgtgcccagccacaaattttcttttaccttggaaaacatatatgcaaatatacttgtcaactatccgacaaaggtcttcagtatgtatgtatggattcattgaacattgtttctttttacataatgaatattttatgatttttagctttggttttttgaaatgaaccaataaattgaagagacacaagaagtaatgtgtgtgtaaataccagcacgcttagcccctcaaataaacctcttacaggtgtctgactcctaaatccaatttgacattttttcagaact

SEQ ID NO: 1717 - DNA, 176 bp, Homo sapiens
cttgtatggcaaaaataaattaattttagctttgtgcagatacatcctattgagttacaaagtgatgctatcaaacaccattgacaacaacaaattcaggatttatggctctctttgtctctgtttctctctcctctctctctctctgtgtatatatatacatatatgtatattat

SEQ ID NO: 1718 - DNA, 3301 bp, Homo sapiens
ttcttaaagtgtcaattaccactttatactgtaaattagtgtgctttgctaaagaagcctctattttaattcccaatttatttatggtcaatctgttggacaccagataacactgcctcttaaaatttgtgtacaaaacaaggagacattaaccttgagtaaaaaatgttgagaccagttcttacattttcattctaaattcacaagtacatattctaaaacaatggtctcatcctcagtttcttaaaaattaaatagtatttcttattctaagattatagattttttaaagatctaatgaactgtgaacactgtgggtaaacaaaacactaacactttttgaaataaaattaaatgaaaacaaattgctaaatttcatttttcctttaacatgttatacattaagccttaagataaatgaatatattttaatttaaaaagaaaaagaaagctggcaataaaaacctcttcctaaaacaaacatttctttttagaacactaacaaaattttcattcttataatattcagatttacagcagcttcaaagaagattattagactttcactcctaattgtactttctccatacatagatacaaatatctagaatgagatactttacaaaactgcttctattttccagaagtctatttcaagagctgttaaaaaatgtttaaaactatgtgaggaaaaatggataatttaaaacttttaaagtacctcatcacccatctgtggcacaaatggacatcttcggggaatggtatctgtaatccatgttgatggcaaccattcttctaatgtcaaaccattttcagttagttctcccacagccaatctctgacaaaatttaagtaataattgttaagtaataatcaaaaaagcattaatccacaaatctactctttaaaataactataaagataattaaataaaaggggaagggcaccattgtacaatattatatacagttggccctgtgtatccatgggttccacatccatgcattcaaccaaccttgactgaaaatatttggaaaaaaaattccacaaagttccaacaggcaaaacttgaatttgctacattctgaatactatgttgaatccacacaaataaaatgatgtgtaggcactgtagtaggtattataaataatctagaaatgacttaaagtatataggagactgtgtgtaggtcacatgcaaatactatatgccattttttataagagacttgaacatccctggattttgttatctgcaggggtcttgggaccaatcctccgtgtctactgagagatgactatcctttaagcaacaaaacacttattctagaaaaaatggcagcagtggcaacagagttattcaatctctccaaatcactgtctacaaagagaactaactagaagcaaaacccaaaaatccatagccaacactcacaacaaggtaacaagatatccccacaaaccccaaagtacaagctctgtgtattctcctttcctttcaaaatgctatcaattttataaacattccatataacaaaccaagacagcctagagtttttttttaatcctagttatagtaagttacaactaaataaggtattctcataggagttgagtagtgcaacatgtagaaagctaattatttccataagctggacattacacttctacacagcatgagaaactatgcctctgagaaagttccttaactttgctggtcacccacaagtggccacaatggtcttgatgttgttaccttagactcaggaaaaaaatgaactttctaagaacatttgaaacctaatatttttacaagtaaaaaaagttatgcaattgattaaagtcttttgtgaatcacacgtaaaacattaaaaatgattgtacactaagactgctacattttacttgtttttttaaaaacaaggtagtgtaattatcagtataaaataatacttgtttactaaaagaagcaatgccataacatgatatcagagaacactacttgcaataggtaatactactacttcccaactgtagtagttgtcattttcctctttttcctattagccacagccacactgagtgtttctcagtcaaacatatcaagagcattaccctggagagttagggtaaaggtctttggaatttactgtacgtgagatgggctcgttacagaattttaggcagaagcatagtacgatctcacttatattttaaaaggatcactctggatgcatcaaaacaaggatcagcaaatcatgaccctcagggcaagtctggcctgccacaattttcataaatttttatcggaacacagccatacccatttatgtattgtctataaatgctattatggcagagtagctggccttctgtagaaaaaatctgtcaacctatgctttaaagaatagaccctagggagaaacaaggagaaacaggaagacacatgagatgctaccacagtaatataaatgagagttcagggtgattcacaccaatgtgatggcagtggagtggtgaaaaacagtaaagtgctgaatatacttataatccattagataattaattccctgatggactggatgtggaatatgagagaaaaagaggaatcaaagatatctccagggtttctggtataaacaactaagagagtcgtcatattactgagataaagagggctggggtacagcgggtttgaggaaaaagcttggtaaataagttttgtaggtgttggatgtgaggagtaaaatgatatccaaacagtaatttgatatatacacagttatcaaataaagtagccattatgttatgcactgagtatatcacagagatcccacaacccaggaacttccactgtgctttattcagagcagctgctatcagttttgtatactgaggagctaaaagtttgtttgaaaaaggtttcctttgactaataaaaaggaaaagaaagacagaaaagtttgaaaatcataattctagcctcaatatggactattaattgctaggcaaggatttctccccataaggaatttatctatgttcaatggggaagctaacaacttttacatcaagacaggtaagttgtatattaaataagaataatcatatgtatgactgaaagactttgggcatcaccaaaaatcattatgaggacatatcttattccccaataattcctgaggaacttagaatgtttggttgaggaagatttctgtcacttattaattataaccattaaggggttaagaatgcattgagtattctttaacatttctagctccatgatttgaggttt

SEQ ID NO: 1719 - DNA, 6019 bp, Homo sapiens
gcggggaggggccaagatggccgaataggaacagctccggtctacagctcccagcctgaacgatgcagaagacgggtgatttctgcatttccatctgaggtaacgggttcatctcactagggagtgccagacagtgggcgcaggtcagtgggtgcgcgcaccgtgtgcgagccgaagtagggtgaggcattgcctcactcaggaagcacagggagtcagggagttccctttcctaatcaaagaaaggggtgacggacggcacctggaaaatcgggtcactcccacccgaatactgcgcttttccaatgggcttaaaaaacggcgcaccacgaaattatatcccgcacctggctcggagggtcctaccccacggagtctcgctgattgctagcacagcagtctgaggtcaaactgcaaggcggcagcgaggctggggaaggggcgcccaccattgcccaggcttgcttaggtaaacaaagcagccgggaagctcgaactgggtggagcccaccacagctcaaggaggcctgcctgcctctgtaggctccacctctgggggcagggcacagacaaacaaaaagacagcagtaacctctgcagacttaaatgtccctgtctgacagctttgaagagagcagtggttctcccagtacgcagctggagatatgagaacgggcagactgcctcctcaagtgggtccctgacccctgacccctgagcagcctaactgggaggcaccctccagcaggggcacactgacacctcacactgcagggtactccaacagacctgcagctgagggtcctgtctgttagaaggaaaactaacaaacagaaaggacatccacatcaaaaacccatctgtacatcaccatcatcaaagacaaaaagtagataaaaccacaaagatggggaaaaaacagaacagaaaaactggaaactctaaaaatcagagcacctctcctcctccaaaggaacacagctcctcaccagcaatggaacaaagctggacgcagaatgactttgatgagctgagagaagaaggcttcagacgatcaaattactctgagctacaggaggacattcaaaccaaaggcaaagaagttgaaaactttgaaaaaaatttagaagaatgtgtaactagaataatcaatacagagaagtgcttaaaggagctgatagagctgaaaaccaaggctcgagaactatgtgaagaatgcagaagcctcaggagccgatgcgatgaactggaagaaagggtatcagcaatggaagatgaaatgaatgaaatgaagcgagaagggaagtttagagaaaaaaacaataaaaagaaatgagcaaagcctccaagaaatataggactatgtgaaaagaccaaatctacgtctgattggtgtacctgaaagtgatggggagaatggaaccaagttggaaaacactgcaggatattatccacgagaatttccccaatctagcaaggcaggccaacgttgagattcaggaaatacagagaacgccataaagatactcctcgagaagagcaactccaagacacataattgtcagattcaccaaagttgaaatgaaggaaaaaatgttaagggcagccagagagaaaggtcgggttacgctcaaagggaagcccattagactaacagcggatctctcagcagaaactctacaagccagaagagagtgggggccaatattcaacattcttaaagaaaagaattttcaacccagaatttcatatccagccaaagtaagcttcataagtgaaggagaaataaaatactttacagacaagcaaatgctgagagattttgtcaccaccaggcctgccctacaagagctcctgaaggaagcgctaaacatggaaaggaaaaaccggtaccagccgctgcaaaatcatgccaaaatgtaaagaccatcgagactaggaagaaactgcatcaactaatgagcaaaataaccagctaacatcataatgacaggatcaaattcacacataacactattaactttaaatgtcaatggactaaattctccaattaaaagacacagactggcaaattggataaacagtcaagacccatcagtgtgctgtattcaggaaacccatctcacctgcagagacacacataggctcaaaataaaaggatggaggaagatgtaccaagcaaatggaaaacaaaaaaagacaggggttgcaatcctagtctgataaaacagactttaaaccaacaaagatcaaaagagacaaagaaggccattacataatggtaaaggggtcaattcaacaagaagagctaactatcctaaatatatatgcacccaatacaggagcacccagattcataaagcaagtcttgagtgacctacaaagagacttagactcccacacattaataatgggagactttaacaccccactgtcaacattagacagatcaacgagacagaaagttaacaaggatacccaggaattgaactcagctctgcaccaagcagacctaatagacttttgcagaactctccacctcaaatcaacagaatatacatttttttcagcaccacaccacacctattccaaaattgaccacatacttggaagtaaagctctcctcagcaaatgtaaaagaacagaaattataacaaactatctctcagaccacagagcaatcaaactagaattcaggattaagaatctcactcaaaaccgctcaactacatggaaactgaacaacctgctcctgaatgactactgggtacataatgaaatgaaggcagaaataaagatgttctttgaaaccaacgagaacaaagacacaacataccagaatctctgggacgcattcaaagcagtgtgtagagggaaatttatagcactaaatgcccacaagagtaagcaggaaagatccaaaattgacaccctaacatcacaattaaaagaactagaaaagcaagagcaaacacattcaaaagctagcagaaggcaagaaataactaagatcagagcagaactgaaggaaatagagacacaaaaaacccttcaaaaaattaatgaatccaggagctggttttttgaaagatcaacaaaatcgatagaccgccagcaagactaataaaagaaaaaaagaagaatcaaatagatgcaataaaaaatgataaaggggatatcaccaccgatcccacagaaatacaaactaccatcagagaatactacaaacacttctacgcaaataaactagaaaatctagaagaaatggataaattccttgacacatacactctcccaagactaaaccaggaagaagttgaatctctgaatagaccaataacaagatctgaaattgtggcaataatcaacagcttaccaaccaaaaagagtccaggatcagatggattcacagccgaattctaccagaggtacaaggaggaactggtaccattccttctgaaactattccaatcaatagaaaaagagggaatcccccctaactcattttatgaggccagcatcattctgataccaaagctgggcagagacacaaccaaaaaagataattttagaccaatatccttgatgaacattgatgcaaaaatcctcaataaaatactggcaaaccgaatccagcagcacatcaaaaagcttatccaccatgaacaagtgggcttcatccctgggatgcaaggctggttcaatatacgcaaatcaataaatgtaatccagcatataaacagagccaaagacaaaaaccacatgattatctcaatagatgcagaaaaggcctttgacaaaaatcaacaacctttcatgctaaaaactctcaataaattaggtattgatgggacatatttcaaaataatcagagctatctatgacaaacccacagccaatatcatactgaatgggcaaaaactggaagcattccctttgaaaactggcacaagacagggatgctctctctcaccactcctattcaacatagtgatggaagttctggccagggcaattaggcaggagaaggaaagaaagggtattcaattaggaaaagaggaagtcaaattgtccctgtttgcagatgacatgattgtgtatctagaaaaccccactgtctcagcccaaaatctccttaagctgataagcaacttcagcaaagtctcaggatacaaaatcaatgtgcaaaaatcacaagcattcctatacaccaacaacggacaaacagagagccaaatcatgagtgaactcccattcacaattgcttcaaagagaataaaatacctaggaatccaacttacaagggatgtgaaggacctcttcaaggagaactacaaaccactgctcaaggaaataaaagaggatacaaacaaatggaagaacattccatgctcatgggtaggaagaatcaatattgtgaaaatggccatactgcccaaggtaatttacagattcaatgccatccccatcaagctaccaatgcctttcttcacagaattggaaaaaactactttaaagttcatatggaaccaaaaaagggcccgcattgccaagtcaatcctaagccaaaagaacaaagctggaggcatcacactacctgacttcaaactatactacaaggctacagtaaccaaaacagcatggtactgggaccaaaacagagatatagatcaatggaacagaacagagccctcagaaataacgccgcatatctacaactatctgatctttgacaaacctgagaaaaacaagcaatgggaaaaggattccctatttaataaatggtgctgggaaaactggctagccatatgtagaaagctgaaactggatcccttccttacaccttatacaaaaatcaattcaagatggattaaagacttaaacgttagacctaaaaccataaaaaccctagaagaaaacctaggcattaccattcaggacataggcatgggcaaggacttcatgtctaaaacaacaaaagcaatggcaaccaaagccaaaattgacaaatgggatctaattaaactaaagagcttctgcacagcaaaagaaactaccatcagagtgaacaggcaacctacaaaatgggagaaaattttcgcaatctactcatctgacaaagggctaatatccagaatctacaatgaactcaaacaaatttacaagaaaaaaacaaacaaccacatcaaaaagtgggcgaaggacatgaacagacacttctcaaaagaagacatttatgcagccaaaaaacacatgaaaaaatgctcaccatcactgcccatcagagaaatgcaaatcaaaaccacaatgagataccatctcacaccagttagaatggcaatcattaaaaagtcaggaaacaacaggtgctggagaggatgtggagaaataggaacacttttacactgttggtgggactgtaaactaattcaaccattgtggaagtcagtgtggcgattcctcagggatctagaactagaaataccatttgacccagccatcccattactgggtatatacccaaaggactataaatcatgctgctataaagacacatgcacacgtatgtttattgtggcattattcacaatagcaaagacttggaaccaacccaaatgtccaacaatgatagactggattaagaaaatgtggcacatatacaccatggaatactatgcagctataaaaaatgatgagttcatgtcctttgtagggacatggatgaaattggaaaccatcattctcagtaaactattgcaagaacaaaaaaccaaacaccgcatattctcactcataggtgggaattgaacaatgagatcacatggacacaggaaggggaacatcacactctggggactgttgtggggtgggggacgggggagggatagcattgggagatatacctaatgctagatgacgagttagtgggtgcagcacaccagcatggcacatgtatacgtatgtaactaacctgcacaatgtacacatgtaccctaaaacttaaattaaaaaaatacca

SEQ ID NO: 1720 - DNA, 527 bp, Homo sapiens
gtgagaagtttgaatacaaatatccttcaaaacaggagttttaatctctacgctatattcccaaaacctaaatggagtgagaaaatgcatctttaatttttcttttatattagattaagtcagaaggcacgatttcactcttgactttgataattacagaaattgtagtttcaatattctttaaaaatacctaaaatcaggtttataactttcatttgccctagaaaatgaaggcaaacaaaccaccatgatattcatgctggaaatgagaaaaccaaggtcatagcaaggaagtaaaaccaaacagaatctctccccatcgaaaaataaccccgaaagctagaatgaaagatgacaaaattatgaccaaacacacaaaaaatacttcagtaatcataaatttgaaaagaaaaaatataaacgatgggaaagctagcttgggcccacatgcctaacacctcctctgccgcaccctcctttgcaattgagatgaccagcgacagcagaacctgggggttccaggtagg

SEQ ID NO: 1721 - DNA, 773 bp, Homo sapiens
ataaggccagagctgtgcttaattagtcctggaggcacaagaaaaaatgttaaatttattccattgattccaagcaaaagatacttaaacttatccaggggctagggcattagaagagaggcagttttagagaactctttctccttatgtaccctaatgtttgatattttgttatttaatagttattgaacatttgttgcatatcagacactgtgctgtgttctgcatgcatttcctgttctttgattttcctacacgtgaggaaactgagagttagagaagttaactaacttgccaaaggcccccagccagtatgtgataggctgggagatggctgccctaccctctgactcccatgccttggctcatcatctgcttttctgttttgtagcccagcacttccagggttagactacaaattctagaagaaatgtaggcttttttcccctctgtgtttaaaaatgtcctacaaatctcaaagaattaatcacttaggagtgtcatctaactctgattttatgacagcccagagttgttcattttacttcagggcatttgagaaatcatccatttatcctctttcaggttttggaaaatatatcttgcgactgccacagattgcatatcctagaaagtgagcttattctggctgaagggaaagaatgtttcagcaagagtggaaattgtaatgggccactcatgaataaaccctacatgggacctgagacccctggcatgaagagtactagcagtttatttaccagagattgact

SEQ ID NO: 1722 - DNA, 301 bp, Homo sapiens
agcactgtgggaggccaagacaggaggatcacctgaggttgggagttcaagaccagcctgaccaacatggagaaaccccgtctctactaaaaatacaaaattagccaggcatgatggcgcatgcctgtaatcccagctacttgggaggctgaggcaggagaatcgcttgaacctgggagatggaggttgcagtgagccgagatcgcgccattgcactctagcctgggcaagaagagcgaaattccgtctaaaaaaaaaaaagtgtcttgaagaagtcacttgacctcaccaaacctcagtt

SEQ ID NO: 1723 - DNA, 327 bp, Homo sapiens
  SITE (16): n equals a,t,g, or c
ggaggtaacagaatgngctaactcaaaccggttgaagcaaaaggaaatgtattagctctcacagaaggtggttaaggataaggctgggctccaagtttgctcaatccagtgacctagttttgccagcagagaaccagttctttctatgtctacatttgctttgtaacccacagggtcagccttatcctaaggctggttccctcattgtcatgggacggtcgtccatggaaacttgggctcatgctctcttgttaatttgggaggtatagggacttcttgcagctctcttaagactaaagaagaacttttccacacatctccagcaaa

SEQ ID NO: 1724 - DNA, 666 bp, Homo sapiens
agtttttcattttacacttaggtctgtggtccattttaagaacatttttatgaagggtgtaaggtctgtgtctagctcccattcaaggcttattatatctcacctggagtgtcagcctgcctgcatttcttgtcccctccaattccaacttgaattgactaaattcctggtgagtgtagccaagagtcatgcctccaggcttcaggccagcacttgtggatggaacctccaggccagtacacccaggacccagctccaggataaccttggcagtctcaggcaccaggccagcacccacagccctaggacccagccatgaccttaagtacccagcttctaggcctgccccactgccaggccaggccccatagccccagactccaggcagatacccatggacctagtttccaggccctcctctgcaccagaccaacaccactataccctagctccaggctagcctttactaacctaggaaccagtccaccacagtgccaggctagccaccacatctccagactccaagccagcatctgcagacccaggctccaggcctgctctagcaccaggctggcccctgaagccccaggcttcaggctcactgtagtgctagggtggcaccaacaggcaccagcaccaagcctgctcctgcagcctcagggtcca

SEQ ID NO: 1725 - DNA, 4558 bp, Homo sapiens
tatgctttctacccgtaactcactgtaaataaaaagaaagggataatatattgtgcaaactctagtcaaaaaaaagttggaatgacaatattaatataaacaaaagtggacttcaaaagaagcaatattatcagagagaaagagggcactgcttggtgaattgccccctgataaagacataacaataccggaagtaaaaattgacataactgcaaggggaaattgacaaatccacaattatatttgggatttaaatgctttactcttaataattaataaaagttagctaaaaaattaattttagctaaataaattagctaaaaagttaacaaggatagatctgaacaacactaggataaacttgtcctaatggacatttatagaccactataaccaaaagtggtagaattcacaatttttgcaagtacacatggaatattcaccaaaataaaccatatcctgatttataaaataaactaacaaactggcttctctcacttagcaatatgaatttaaatttcccccatatctcttcatggctttatacctcatttccttttattgctgaataatgtttcattttatggatgggccataaaatgtttatctatgcacctatagagggacatcttggttgcttccaagttttggccaatattaataaagctgttataaacattcatttgcaggtttttgtgttatcatgaatttccactcatttggttaaatacctaggaatataattgctagatagtatagcaattctgtttagttttgtaggaaactgcaaactgtcttccaaagtggctgtatcattttgcatttccactaacagtgactgggagttccttatgctaaacatcctctacagtatttggtgtggtcagtgttatagattttggctattctttcaggtgcatagtggcatcttattgttgttttaatttgcaattccctgatgatgtatgaggggacttcaaaaatttatggaaaaattgaactaaaaggtaaaagtaaaaaatataaacttcttaacataagctccatcgagttcaagatactttgtaagcaatgataccagccatttggttcatccctaaggaactgagggttctgagaatttaatcaggtcaatgaagtcttttttacgttatgaactgaagaaaaatgtgtgcaatttaaaggtttgttaagactttgaaacaaaaagaagtcagaaggagccaaatcaggactgtaaggtggatgaatgcctaatgatttcccatcaaagctctcacaaaattgcccttgtttgatgagaggaataagcagaagcattgtgatggggaaggactctctaatgaagctttcccaggtgtttttctgctaaagctttggctttctcaaaacactttcataataagcagatgttgttgttctttggccctccagaaaaccaactagaaaaattcctttaacattccaaaagactattgccatgagctttgttcttgaccagtccagttttgctttgactagaccgcttccacttcttggtagccattgctttgattgtgctttatctttaggatcatactggtaaagccatgttttgtctcctgttaaaattcttcaagaaattgctacaggatcttgatcctacttgttaaaatttccattgaaagctcagctcttgtctgcagctgatctgggcacaacagttttggtacccattgagtggaaagtttgctcaactttaatttttcagtcagaatagtgtaagctaagccaatttagatatctatggtgttgactattgtttgtgctgttaattcttgttcttcttcaattaaggcatggacataatttttttcaatttttttttcaaacgatgtggaaggcttgctgctatgtgcttcatcttcagcatcatctcatcccttcttaaaatgagttatctgtttgcaaactgctgatttcttttggagaatcatccccataaacttctcataaagcatcaatgattttaccattcttccacccaagcttcacactaaatttgatgtttggttttgcttcaattttagtagaatttatgttgctctgacaggtgctcttttcaaacttacgtcttacctttttagtgcctcaaactacatcctgttcaggcatgttataacaagttagtatgagcttattttggtataaaaaatttggactccataattttttcataatatgcatttttcattaccttttggaagacaactcatatcaccttgagcttcttttcatatgcctattttccatatgtatatcttctttggtgaggtgtccttttcagatgtttgtacatttaaaaatcagttattacccactcccaccacttctattcaacatagtactggaagtactatcaagagagagcaattagacaagaaaaagaaattaaagatatctaaattggaaaggaagaagtaaaatgatctctctttgcacatcatatgatcctatgtgtagaaaactccaaagactccaccaaaaaaacctattagatctaataaatgaattcagtaaagttgcaggatataaaattaatatacaaaaatccatggccattttattcacaaataacaacctagctgagaaatcaagaaaacaatcccatttatgataacataaaacacttaagaatacatttgaccaagaagatgaaagtgcatcagtatagcctgcacactgaaaaccacaaaacattgatgaaatacattgaagaggacacaaataaataaaacgatattccatgctcatagattggaagaattaatgttgttaaagtgtccatactacccaaagcaatatatagattcaatgcaatccctatcaaaatctcatcagcattcttcacagaaatagaaaaaaatcatacaatttctgtggatccacaaaagatcccaaataaccaaagcaattctgagaaaaaaaaatcctggaggcatcatacttcccaatttaaatttatattacaaaacgagagtaatcaaaacaatacagtattggcataagagatacacaggacagtgaaatagccagaaataaatccaaacatgtatggttaatgaatttttgacaagagcaccaaaaagacaaaatgagaaaagggtagtctcttcaataaataggtgctggaatttccacatgcaaaagaatgaaattagactcttacattacaccatacacaaaaatcaatccaaaatggataaaagatctgaatgtaagacctgaagccataaatctagaagaaaacataagggaaaagctccttgacactggctttggcaatgtttccttggatatcacaccaaaacctcaggctacaaaagcaacaataaataaatgaaattatatcaatctaaaaaacttctacacagaacgaaaacaatcaacaaaatgaaaaggcaatgtacagataaggagaaaatatttgcaaaccatatatcaggcaaggttttaatattcaggatttaggaagaactcatacaactcaatagcaagacaacatataacctgattaaaaaaaagtggggaaaggacttgaatagacatttcttcaaagatgacagaaaatgaccaacaggtatatgaaatggtgctcaatatcaccagtcatcaggaaaatgcaaatcaaaactactttgagataccacctcatacatgttaggatagctattatcaaaaagacaagagctaacaagtgttggtgagggtgtggagaagagggagcacttgtacactgttagtgggaatgtattatatattggtgcagccattatggaagacagtatggaggttcctaagtaaattaaaaatagaactaccatatgacccagcaatccctcttctgggtatatccccaaagggaatgagattatctctgcactcccaagtttattgcagcacaattcacaatagtcaagatacagacacaacctaggtgttcatcaatgggcaaatggataaagaaactgtgatatagagagatcaatagatagataattagaatattatttagcctttaaaaagaaggcagtcctgtcatttgccaaaacatggatagacctagaagacattatgctaaatgaaataagccagacacagaaagaaaaatattgcgtgatctcacttatatgtggaatcaagaaaaaaaaggttaaatatatagagatagagaataaaacagtaattactaaggtcaggataaggtggaggaaatgagatgtaggtcaaaggatgcaaagtagtaaatatgcaggatgaacaagtgaaaagatcaaagatcaaatgtacaacatgaggactatagttaatacatattgtatattgtgttcaggactttttgctaaatgagtagattatacctgctcttgccaatgggggaataatcagtaactatgtgagatgatgggtatgttcattgttccactatagttttactatatatatatatatgtttcatttaacattgtgttgtataccttaatatagacaataaaatttatttaaaacataaaaaaaa

SEQ ID NO: 1726 - DNA, 279 bp, Homo sapiens
aagacttaaaaatccaaactaacattatacctcaaggaactctaaaagaccagcctaaactgaaagctggcagaaagggaataaaggtcagaacaggaataaaaatgaatagagactagaaaaacaacagaaaggataaacagaactaagagttagtattttgaaaagataagcaaaattgacaaacttttagcttgactaagaaaaagagagaagactgaaatgaataaaatcataaatgaaagagaagaccttacaactgatactacagaaatataa

SEQ ID NO: 1727 - DNA, 795 bp, Homo sapiens
agatccgaggtatctcctggagaagccatctatgatgtcattggggaaatgccgccagcaggactgtacgaggaaatcatggaggccgaggctgtgctccaagatgaggaggacggaagtgtggtgaaggtggacacagaagccgcaggtgggtttgtgctccagctcaggggtgagctctggggtgggctacggatgctgaccacaagatgcagtggaaagggactctgaccacaggagcctggcttcagaaggctgctgaccacagggctcatggatgcaaagggactcgtgggcaggggagagcagggccacacccatgagggcagagtcagtggctggagtccccatcggagaggcctgccctgtggtgggagaagagggctggtcgggtgtgctgggagccgcgggtctggcaggggcatatgctgcagctcactcagcctcagtttcatcacctgtgggagctgtgctgctgtcacaggctgcttggggtgcttcaatgtcaggatgccttgaacattgccaggtgctttctggttgacatgtttatgcgttcctgtcttacgggctttgccaaatgtgctctggggacaacttgcacgtgtgctgatttggtcacgcggtgtctcttgcgccagtttcaggggaggtgtctaacctcctggagggacagtctatacgtgcggagggaggacacagcagacctgtttctcagggatatgacgaggctgcgtttcctttggaggagatgacgttgtaaagcaacctgaggatgagatacaccagctggct

SEQ ID NO: 1728 - DNA, 3890 bp, Homo sapiens
ggattgtgcacctgtgcctgcgaaaggctgaccagaagctggtgatcatcaagcagattccagtggaacagatgaccaaggaagagcggcaggcagcccagaatgagtgccaggtcctcaagctgctcaaccaccccaatgtcattgagtactacgagaacttcctggaagacaaagcccttatgatcgccatggaatatgcaccaggtgggccagcctccttacagtggcctggctggagggcctcttacctctgggacaggcagacacagatctcctggcttccctccttggaatgggcatggcaagggttagagttctggtcccaattatctgaccccggctagccccttgtcctctctggtcccagtgccctgttccatacataaaaggagaggggttgttggctgggcacggtggctcatgcctgtaatctcagcactttgggaggccaacgccgaggcgggcggatcatgaggtcaggagatcgagaccatcctgtttaacacggggaaaccccgtctctactaaaaatacaaaaaaaaaaaaaaattagccgggtgtggtggcaggcacctgtagtcccagctactaaggaggctgaggcaggagaatggcttgaacccgggagggggggcttgcagcagtgagctgagatcatgccactgcactccagcctgggcaacagagcgagactccatctcaaaaaaaaaaaacaacaacaacaatggagaggggttgtcgtaggtgtgagaaagcctggatcttgattagtcccttgggccacaggcggcactctggctgagttcatccaaaagcgctgtaattccctgctggaggaggagaccatcctgcacttcttcgtgcagatcctgcttgcactgcatcatgtgcacacccacctcatcctgcaccgagacctcaagacccagaacatcctgcttgacaaacaccgcatggtcgtcaagatcggtgatttcggcatctccaagatccttagcagcaagagcaaggcctacacggtgcctgggcatggaagggacctccagggcactagaagtcttgagggccaggacctaaccctgcctcctcccctccccctaaaaaacccttggccctttggcccctgtttgggtggttctgcaggaggaagccccttggcttgctttgagaagaagctgtccccaaatgggcttatgcacagagcccctggtcttccctccctgcagggctgtgatcccagcttctatcctgcaggtggtgggtaccccatgctatatctcccctgagctgtgtgagggcaagccctacaaccagaagagtgacatctgggccctgggctgtgtcctctacgagctggccagcctcaagagggctttcgaggctgcggtgagtgtatgcaccctccaggggacaactgagaaatctactgcctcgcccagcagcccttggctcaagccacctcaggtttctcctctagctgagtcatgtctctcccttatcagattaccccaggggagggctatgggtgtccctcagactatggatttctgagagtaggtcttgcctcccattagacggagggctcctgagggcagggctgtggctttcccagaagaccctcccaagagcaagacttgagttttcccagcatgctggggtttctgaggatatagctgcagctcccctatcagactagggatcactgaaagccaggttggactcccctgtcagtctgggagtctcctcatcagactgaagtctcctgagggcaaagctgttattgtttatttatttattttttttattatactttaagttttagggcacatgtacacaacgtgcaggtttgatacgtatgtatacatgtgcgatgttggtgtgctgcacccattaactcatcatttaacattaggtatatctcctaatgctatcccttccccctccccccaccccacaacaggccccggtgtgtgatgttccccttcctgtgtccatgtgttctcattgttcaattcccacctatgagtgagaacatgcggtgtttggttttttgtccttgcgatagtttgctgagaatgatggtttccagctccatccatgtcctacaaaggacatgaactcatcattttttacggctgcatagttttccatggtgtgtatgtgccacgttttcttaatccatctatcattgttggacatttaggttggttccaagtctttgctattgtgaatagtgccacaataaacatacgtgtgcatgtgtctttatagcagcatgatttataatcctttgggtatacacccagtaatgggatggctgggtcaaatggtatttctagttctagatccctgaggaatcgccacactgacttccacaatggttgaactagtttacagtcccaccaacagtgtaaaagtgttcctatttctccacatcctctccagcacttgttgtttcctgactttttaaagatcaccattctaactggtgtgagatggtatctcattgtggttttgatttgcatttcttgatggccagtgatgatgagcattttttcatgtgtcttttggctgcataaatgtcttcttttgagaagtgtctgttcatatccttcgcccacttgttgatggggttgtttttttcttgtaaatttgtttgagttctttgtagattctggatattagccctttgtcagatgagtagattgcaaaaatcttctcccattctgtaggttgcctgttcactctgatggtagtttcttttgctgtgcagaagctctttagtttaattagatcccatttgtcaattttggcttttgttgccattgcttttggtgttttagacatgaagtccttgcccatgcctatgtcctgaatggtattgcctaggtattcttctaggggtttgatggttttaggtctaacatgtaagtctttagtccatcttgaattaatttttgtataaggtgtaaggaagggatccagtttcagctttctacatatggctagccagttttcccagcaccatttattaaatagggaatcctttccccatttcttgtttttctcaggtttgtcaaagatcagatagttgtagatgtgtggcattatttctgagggctctgttctgttccattggtctatatctctgttttggtaccagtaccatgctgttttggttactgtagccttgtagtatagtttgaagtcaggtagcatgatgcctccaggcaaagctgttattatcccaggagaccaggggctggagctggggggtgctgccctcacttccccaaattctcaacctggtgccttcacagaacttgccagcactggtgctgaagatcatgagtggcacctttgcacctatctctgaccggtacagccctgagcttcgccagctggtcctgagtctactcagcctggagcctgcccagcggccaccactcagccacatcatggcacagcccctctgcatccgtgccctcctcaacctccacaccgacgtgggcagtgtccgcatgcggaggcctgtgcagggacagcgagcggtcctgggcggcagggtgtgggcacccagtgggagcacaggaggtctgaggcagagggaaacctggggcaagtcctcccttcctgcatgtaggaatgtcaggagggtctttgtccttaggcccccatctgtcctgcagggcagagaagtccgtggcccccagcaacacagggagcaggaccaccagtgtccgctgcagaggtaagtgggaagaggccgccagtccccatggatgccacaccattcccatcagtttaatagtccccatgcactgtacctgcaggtatcccccggggacctgtgaggccagccatcccaccaccactgtcgtcagtgt

SEQ ID NO: 1729 - DNA, 5345 bp, Homo sapiens
aggcggaggcagtctccttcctggggcagtggagcagccacagccccagttcatctcgcgtttcctggagggccagtcgggtgtgaccatcaagcacgtggcctgtggggacttcttcactgcctgcctgactggtgagttgtcgggcctaccttgtgggacctgctctgaggccccacagagcaccttctctcttctcttgcaaaacacgcacttaatgaatgcttctgtctactagttatcgagttattgcttctgtctagtaactattgaggagatttccttatacaacctcctttaccctacggacaggcctggcaaggcagttattatattatcctcatttgacaagtggggacgctaaggctcagagagggtgtcacttgtccaaagtcacatatgtttgaagggactcatatccttttctctcttcctatcccatccttccagccctggtccccaactttattttgctgctgcaacccactggaggaccgggctatctggaaagactgtttaacttctttcccttctccttcctcactgcccttctccccagacagaggcatcatcatgacattcggcagcggcagcaatgggtgcctaggccatggcagcctcactgacatcagccaggtgggtgtcacatataccttgggaaggggaagtcgggggatggcggggagcccacatctgtgagttgacaccagattgggggcaggggagttcccagcaaccacaggttcctctagcttcccagctgcacctgctctgggccacctacatcggggaaagtacagaaaaaccaggcttccccaatggttgcccacctggcagtgtgtatggctggatttaaagacacagccacctcctgagaatgtgtagcctccagctttgtccctacagggggtgttgaagccagatggctccagaccctttgcccagtttctccttgcttcctctcctctctagcccaccattgtggaggctttgttgggctatgaaatggtgcaggtggcctgtggggcctctcacgtgctggccctgtccactgagcgagaactatttgcctggggccgtggagacagcggtaagctccagcctttaggccccatctcacagcatcctcagccatgacttgctccccttcatacccaccttccacctcacagcacattctctcttccctcttttctctcaaattctcttcattcattcaacaaacctttattttacaccgactatgtgcacaccctgtgctgggtgctgagatgagatggagatgtggcttccttcaggtgtttatgaggtaatgaaggaaatttcattcatccacctagtttttttttttattttgagatggagtctcgctctgttacccaggctagagtgcagtggcgtgatctcagctcactgcaacctccaccaccgggttcaagcgaatctcctgcctcagcctcccaagtagctggcattacaggcacccgccaccgcgcccagcaaatttttgtatttttagtagagacagggtttcaccatcttggccaggctggtctcgaactcctgacctcgtgatccacatgcctcagcctcccaaagtgctgggattacaggcgtgagccaccacgcctggcccatccactaattttttttattgaggtcctctttgggtcaggcatcaggctggccactgaaactagagatgacactgatgggttcttgtcttcctggaggactcagtctagtgggagaaagatgacattgccagcatgccagagaacagatagcatcagggctacaccccagtgcagaggcgtggaattcagtgaacagtaatgtcaactggaggagagagatgtcatttgaacagggctttaaaggaggaggattttgagccggcgtggtggctcacgcctgtaatcccagcactttgggaggccgaggcaggtggatcacaaggtcaggagttcaagaccagcctggccaacatggtaaaaccccgtctctactaaaaataaaaaaattagctgggcatggtggtgcatgcctgtaatcccggctactcaggaggctgaggcaggagaatcgcttgaacccaggaggcagaggttgcagtgagtgaagatcatacccttgtactccagccttggcgacagagtgagactcagtctcgaaaaataaaaataaaaaataaagaaggaggattttaaccagcagaggggcctaggaaaggcatttgggactgagagaacagagaactcatgctgttccctcccctcagtgggccctcctcattcgggcatcacccccactaaagctcaaattaactccttctgggtttcttcttgtaggcagactggggctaggcaccagggagtcccacagctgcccccagcaggtgcccatgcccccaggacaggaagctcagcgagttgtatgtggtatcgattcctccatgatcctcactgtgcctggccaagccctagcctgtgggagcaacaggtgaatagatcatcaggatgactaacctgcccctggctctccttggctgcaagtgctccgtccatcattgcctacctttcaccaaagaccagaattgagggggttgagggtgctattggttcaacccagggtgggatctgtctcctggtgcaccagctcctgcccaaactgtctgtcagttggatttggcttctggctctgccctcagggttcaacaagctgggcctggaccacctctccctgggggaggagcctgtcccccaccagcaagtggaggaggccctgagcttcacactactaggctctgcacccctggaccaggagcctctgctgagtatagacctgggcactgctcactcagctgctgtgactggtgaggaggacttgggctctggaggtcagagggggactcacggtctccttggtaccctgttgaagcacccctttccttcctctcccccatagcctcgggtgattgctacacttttggcagcaatcagcacggacagttgggcaccaatactcgccgaggcagtcgggcaccctgtaaggtccaaggccttgagggcatcaagatggcaatggtagcctgtggggatgccttcactgtagctattggggcaggtgaggactgagcatggtgggggcagacagtgccatgagcagtggggggtgggggttgctattcagggccactggactctggagcctcccaggggccatcctggcaatgtgggaggggagatcctgctcgggctgtgcccacttcccacttccctcctggggattcttcctggcagagagcgaagtgtactcttggggcaaaggggcgcgaggtcgattgggaaggagggatgaggatgccggactccctcggccagtgcagttggatgagacacacccttacacggtgacttccgtgtcctgttgccatggaaacaccctcctggctgttcgatgtgagttgtaacttttcccacttcaccacacagcccagctggcccctgtccacactcccatccccagtgttcacagatggccacatcaccaaaagcatctttagcccccagataaaaaaagcagaagctgcggttgaaaagcttcaagcttcctgcctggggtggccaaggctggtgcttcttgggcctcatggaagggctgcctccactgctccccagggctcacatgcattctttctcctactgctgagtcccgttgatgctgaaactctctttctggcctaacagggtccagaatccagggcccagtgggagtgggaggtgggtgatgatttctggaggcactgccctcagaagctgcaagggtttctcttcggtaccctccagcggtcacagatgagccggtccccccctgaggcacccggattcacctctggaccaccctgatattgcttctcctctgaatgctctgaaaagtgcaggtgcccaaggcatgacttgcagctgtctcctggattgtgtcatcatggggtatcagggctggcaaaacccctgctctgcttttggccttggatatggaaacctcaaccactttgttctcctaccacctctttgcccttcctaccccttcctcccttcagtcagtgtccccagggtccagcctggctagagttagaaggcagacctagcctttggaagcagggtggcctccagagccttgccataaaaaggctgaaggcagccgggcgcagtggctcacgcctgtaatcccagcactttgggaggctgaggcgggcggatcacgaggtcaggagatcgagaccatcctggctaacgtggtgaaaccccatctctactaaaaatacaaaaaaattagctgggcgtggtggcacgcgcctgtaatcccagctgctcaggaggctgaggcaggagaatggcgtaaacccctccagcctgggcgacagaaccagactccgtctcaaaaaaaaaaaaaaaacaaaaaaggctgaaggcagctgtagctccacacagaccctaccctttcccctagcccagttagaaaataagtctgggccggcggcggtggctcacacctgcataggcagtgctttggccaggaggatcccttgatcccttgtggccaggagttgggagaccagcctggggaccatagcgagaccgctgtctccaccaaaaaaaaaaaaaaagaagaaaataaggctgggtgcggtggctcacgcctgtaattccagcactttgggaggccaaggcgggcggatcacttgaggtcagtagactgaggccagcctggccaacatggtgaaaccccgtctctactaaaaatacaaaaattaaccaggcatggtgacgggcgcctgtaatcccagctactctggaggctaaggcaagagaatcccttgaacccgggaggtgaagtttgcagtgagccgagatcgcaccactgcactccagcctggatgacagagcaagtctccctctcaaaaaaaaaaaaaaaaaaaaaaaaaaaaaagtatttggtgcttaccgggactctatctccatactttggagcagggcaagccagggcctgcctggactggccattaggcctgcctagcttctgcatagcccggggctgggcggtccccgggagtgctgccacctcccctacactttcatcctgaggcaggatttgctagacgtcggcttgcctctcttccccagcaggagggcaggagtcactaagtgctgcagaaaagatccgcgctggagattgcccgtcccccccatgcctttccccagaaacagttgagagaatgggtagctggtgggaccagaccggtttcccagaggacaggaaggccaataaaaatatcagctgcc

SEQ ID NO: 1730 - DNA, 3495 bp, Homo sapiens
tcctacctgcacctgtggcagcggtgaccgcctcctgggttattttcttttctcccccagctgccccagggttctggtttcccgaatcacttggcaaataaccagcaggtgggcagatgtcttttttgcgttcctacggacgcgtaggcaagttcgatgcgccggagtgaacagccagggtcccatctctcagccggctcccgggcggtgctagcagggaagagggacgcgccggcgaatgaaacactactagcccggaaagccgccctggaccttccacccgggcagcgagtctggcgggccctcgccgccgccccctccgaccagaacagactgcgctgcgagccccgggcttccgccgcagcgcgcagcaattggaggtgccagaggagaccagcagcagcacttgatttagctgggctgcgggaattccgacctgtacactttccagaagcctgatctctccaagtccgcgcccagggactcgagccccggcttccaggttgacccgagcgcgcccccttcgtgctctcggccgcgttcaccgcgcgaggcctccgggtcctgttaagcccgagcaggtgagcgactgggggtggttcggcgtccgccgagacagagcctggccccgggggtcaccctggggtgctgcctggtacctcccaggtacccgcctcccggagccctaagagaggctgaaaaccacggacgctccaggactccgttttctgtacttttgagtaatttgccatcttttccttgcgcaattcgtacaaagcccttccgtgctcacaaagttgatgattgtgaagaagaaaatgtaggttagaggagaggaagcagcatcaggacaccttaccaccactgttagtaaatgacttgggggtacgggttgcttttccgatctgcaaagtaggagggaatgggatgtttgcagacgcagttgctaattgtgcctgagggcgtgggtgccttttgtaccgaaagaacttttggccgttttttcttgtattgttttcaagtcgctgcccgagtgtgtcctcagggcatcctggggaggagccggtgttgcggtttcggggcgcagccgaggccgccccgccgcctcccgtaggcgatcagacttcctctccctggcggttccgggaggagaacctcctacaacaaacaccgccgaagtttccctctccagcgcgatcgccaatcccaggagcgcccggcgcgtgggctgggaaggagccgagcggaaacctggaagtgagccgcggcgcaggcgaatcctgccgttgctggtggcagcgcccaagagaccccgcacagaaagtgggctgggagtctcgcttgctgtacccgcacctaagtgctcagaagcggcctttcgctctgcagagggggggtcttagaagcttggggaagaagcacattgtttcggagttccttgttgcgttctttctccttgggaggagggaattgcacaaggaaaagaagagaagcctttactttgtaactgaaattctccagagttgagttgcgtcgtacagactcggtgcatattttaatacaaaactaagggaagaggccatttgatacttggcttcatctcaaccgtcagccgggggtgacttcaaacagacgcaagattgggctctggggagtaaaaggaagaattaggatggcggttttcaagggaagttaagtctagacatgcttctttgaaagtcacaaggcagaagtggtcaaaagtagaatttaaaagaaccaaaacaaatatcataagcttgtccttctctcctactgggatataaattctcctaagtatctcatcgaaaaggctcctgggacgaaagtcgatgggggcaaatcttggagggaaatttcgtgactgtttgaccatggactaattaataccgttcacctgtagagaggatgcacttggttcccagcgccctcctcccaggtgcttatccaaagggaggccgccctgggtcggatgggtcaccttttggcgtccatctacagtcaagcagtgtggacagggcggtcattttccctctagagacgggttgattcagaggggtgggaacgtcccttgggtcccccgggcacgctgaccactgcactgcacttcccctgaaggaaaggcaaaggttgaagccaaagagttcaaggctcagcctagagaccaggtgatggtgccctggaagacacttccgccagcaccctatggggcgcagtggcgtctaatgctaatgtgggctacgtagctacgggattgggtcgctccgaccctggccgatccggtgccagacagcataagggaggaaaggggactggggggggcacgtgacttcaaccaacccagtaaccaagttttgttttcttccccagcacaggccgctgcctcagcatccaccccgcagcccacgtgttgcaagccggggaaggggtggagtgaacggccggagaccacgtggagaaaggggccgctttggcccttccatctgggtgccgggagcccctaggccctccggccatggcgacagcggcgatgctggcagctccggcccctggtggaaatcgctcaccaacagcagaaagaaaagcaaggaagccgcagtgggggtgccgcctcccgcccagcccgctcccggggagcccacgccacctgcgccgcccagcccggactggaccagcagctcccgggagaaccagcaccccaatctcctcggggcgccggcgagccccccaaaccagacaagttatacggggacaaatccggcagcagccgccgcaatttgaagatctcgcgctccggccgctttaaggagaagaggaaagtgcgcgccacgctgctcccggaggcgggcaggtccccggaggaggcaggctttcctggtgacccccacgaggacaagcagtagccccaatagcctgcgcgctccaggactgcctacccagcactaccccaaacccccagttccaaacccgagacttcaggcccgcccccttacgcgttgtctcattccaccaaattcagaatatttacacaatgccttcatgattttatttttctggaaattgaagtgtcaattgggttctcaatatttcatgactccaaggatgcattaaatatttatttgtggtaagagaagatacctgccgcggaggagggtggcataattatttttttttcaaaaagctattctggggccctggccccctggctcctgtcacagctcagcttgaactctgtagcctctcaaatgaagaaggtggctgttatttaggactctgtggaaagcaaatcacagtgctgtttttaatgcctgagaaatgcactttaggggtagacttataccttaagtgaaggagtgggggaggaagaagcattcttaagtagaagcattttaaaataaggcaggattgcttttaatgttaaactacaaaactgtacagcctattttagtgtggactattaaaacccttgcactgtaa

SEQ ID NO: 1731 - DNA, 303 bp, Homo sapiens
gtggctcacgcctgtaatcccagcactttgggagggaggccgagacgggcgtatcacgaggtcaggagatcgagactatcctggctaacacggggaaccccgtctctactgaaaatacaaaaaattagccgggcgcagtggcgggcgcctgtagtcccagctactcgggaggctgaggcaggagaatggcgtgaacccgggaggcggagcttgccgtgagccgagatcgcgccactgcagtccagcctcggcgactgagcgagactccgtctcaaaaaaaaaaaaaaaaaaaaagtactctta

SEQ ID NO: 1732 - DNA, 897 bp, Homo sapiens
gtgtgaccaaaatctcatccaggtgggcttcctggatgaggcagactacattcagtttaaatgggcctaccatctctagattcagaaaaagaagagggaattgagacttggcatgaaaaaagaattcatgataagggacaggattgggggttggcagagcaacgggagtgaatatagcaaatgttgtcaaataaggctttggaaaaccttcaaaaagtatttcaatttcactccgtagaaagtaatcaaaattagagtaggtaactacccaaaatgttctctccctccttcaggaagaccgatagatcaggactgtacctatttataaaattaagtctgcaattacataagtttaaaatcctatactaaccctttcatccagttttattgttttaaagaacttttttctttaaaattactgtagatgaacaaaacattggcaagtttcaaggttctgtgtctaattttggatcccatccaaatctacaattgctgcagataatcaatagcagacatatagtagagcaatggaacttattaccatattaacatgacatctttaccccactgttctgaaagaatttaaaaccatactaatgcagttatgacagtgaatgcaattcacaatctgccattgaggtttgtaattacatcgttttaaagcagtcctaaattatgcagtgggaggaatacactgatttaatcccaactcagtgaaatcagaaaccaagcaaaattggtgggacagaaagagcataaggaagatgagagaatttgacgacgtgtcttgctgggatttatgtgctttacagatgtttaattacattccaatagtatatacagatttaattttttttaaccttgagataatttatagtaaaaaaaaatgctgaatta

SEQ ID NO: 1733 - DNA, 874 bp, Homo sapiens
gtccaggggaatgactgtgcaaggtagtatctaagcacctgagaagcagtagtgctttgtcgccggctcacggactcccatgcagccttcctcaccaatttggcacaggcagcagtctccctcccaggctctccccatctcccctgctttggtgttgagtgatgagctgagtcagggatagggagtcccctggtgctaaccgtgaacgtagagacttgttctgaggacatccacacaatagtaggaatctccccaaccaatctgtgaatttcatgggggccaaaactgtattttgctcactgctaagtccccagctcaccttaggggctcagcaggtccctgttgaagggaggaaggggaggagagaaggagaaaggcaagcaggcagacagctatgggtctagcatctgcagtgtgttagcgttggggaaacagaagaactagaaggatggatatgctgatgactcctagattggaactccggtccggttctttctctggagctctagatactcactttttgtgccccccaaatgaatgcattttcttcccactaacccttgatttttcttcattcatggtgaaaaatatcaccctcaatctagtgatccaagtcagaaaactgggagttatcgctactctgtttcatagaaatccccatccatcaagaaatatgaaagttaaggctgtaatatgaaatattacagtcactcactcctgtaatcccaacactttgggaggctgaggcgggaggatcacttgagcccaggagttcaagaccagcctgagcaaccaggggagaccttgtttctacaaaagaatttaaaaattagctgggcgtggtggcatatgcctgtggtcccagctactcaga

SEQ ID NO: 1734 - DNA, 462 bp, Homo sapiens
ggatctttcaagctatacctaagatgagtcagctctagggtggaggaggggaacaggggttggacattcccttatagattgctctaatttctgtttttctcttacagagtgtaggtcttcctgaaactctcaagcctctcatctctgcccagccccctcagtggcgctgctatgcaaggcttgtgaacccccagcatgtgtttctgacttttctcccagctaccttctcaggtgccagctgctgacctcctcacgaaccccctcagatacaaacccctgagctccctcactggcccaccaggcagctctgatttatgtctgatcctcttcagatgtccagcgtctggctgcctgtggcctggagggaccccctcaagaggagacaaagcctaagtttggggattggagtggggctcccagtctgaaagatctaggaggaactgggatcaaagctacaaagtc

SEQ ID NO: 1735 - DNA, 856 bp, Homo sapiens
caggtgggaagcttgggtgagggtagaagaggtgttagagtcctgcctgtgcagagggacaggattctctcctgggcggggggtatgcatgtgtcctgctctagggtagggagtagtatcctgttgaggggtgactgacattctaacctccttctaaaccccacaacaggagaagttcctagagatcagtcgtctccacttccgcacagtgccttccaatccccactacttcttctattgccctccatccagcaggcgagaagtgagtggctctcttccttacctctctcgtgccctcaacccagaggcccacccagaccctcttgagtcttggttccctgaggcctggatgtggctcttgtcttgccttagatcaagctgtctaaggcaagacaagtgtaatcccacttgcctaggatgaggcaagtgggattcttgcctcatcatcttgcttcattcttttgcctaggatgaggggcctcgggacacagtagacagaaaaatcagtgacctggagttttcagaggctgagcttatgggagaagaaggtatgtgggcaagtgagtcaaggtggggaaggctggctgcttcacgccgagattcaagggttccactgccagcctctctcattgaccatgtgacatgcactactaggagacacatctgcctgctgtgtggtcactgagagtgacccagagctagaggtagaataccgggagagccgtgaatcagacctggggcctgctgggctagactctgcctcgctgtcagacgtagacactgtgaatcctgatgaagactccttcagtatcttggggggcgactcacccactgggcctgagagcttccttcatga

SEQ ID NO: 1736 - DNA, 572 bp, Homo sapiens
ccatttgcagatcactgctgaacattctccatcctgcctactttgtattagaggacttcttgcagggagaaatataatcagcaggatcctcgctcagagacctggcagacaccaccttaacccagtgatcaaagttaacctccccagtacatgtacaactactgctgccctgaaaggatgcactgagaacatttctgtgtcatttctaccacagatgcgctacttgaatctaattatgaagagacaagagacaaacccagattgaggggcattcagcaaaataattgccctgtactctttaaaaaacggcaatgttgagaaagacaaagaaagactgaggagctattccagttaaagtaggctagagacactgggaaccaaatgtgatgcatgatccaggatattcttttattacaatgagcatcattgggacagttggtaaaatgtgaatattgtctgaagagtataatattgtatcaaagttaatttcctggtcttgaggattgtactgtggttatgtaagagaatgtccttgtttttaggaaatagatgttgaaatatcttgagataaa

SEQ ID NO: 1737 - DNA, 572 bp, Homo sapiens
ccatttgcagatcactgctgaacattctccatcctgcctactttgtattagaggacttcttgcagggagaaatataatcagcaggatcctcgctcagagacctggcagacaccaccttaacccagtgatcaaagttaacctccccagtacatgtacaactactgctgccctgaaaggatgcactgagaacatttctgtgtcatttctaccacagatgcgctacttgaatctaattatgaagagacaagagacaaacccagattgaggggcattcagcaaaataattgccctgtactctttaaaaaacggcaatgttgagaaagacaaagaaagactgaggagctattccagttaaagtaggctagagacactgggaaccaaatgtgatgcatgaatcaggatattcttttattacaatgagcatcattgggacagttggtaaaatgtgaatattgtctgaagagtataatattgtatcaaagttaatttcctggtcttgaggattgtactgtggttatgtaagagaatgtccttgtttttaggaaatagatgttgaaatatcttgagataaa

SEQ ID NO: 1738 - DNA, 2147 bp, Homo sapiens
ccagggtgggcagatcatgaggtcagaagttcgagaccagcctaaccaacatggtgaaaccccgtctctacaaaaatacaaaaatcagccaggcgtggtggcacgcgcctgtaatcccagctactcaggaggctgaggcaggagaattgcttgaacccaggaggcggaggttgcagtgagccaagatcacgccactgcactccagcctggtgacagagcaagactctgtctcaaaaaaaaaaaaaaaatgcagtaaaatgttaacatttggggaatctgggtgaagagtgggaattctttgtactattcttgcaacttttctgtaactctacaattacgtccaaaaaaagaagaattgacaaggtcccaccaaagaggagagacagctttgaacatggaaatacagggcagtaacttggcagtttgctctttggcctgcaaaggcagtattcatgtgagtgagagtcacttgtcttcaagtcctggcattttatgtagcagatcccaaaagctgcctgaaagcccccaggccttgtgtcgtttccccttctgttcacaggtatcttccaggcactcactagaatatggtgtctgacaagtttctcagctaaccaagcatggacccagaattctcagaaataccaaggacagtttctatggcactgaccaggcttcaccctagagagtggtcccctaccgagaacaattcttcctttcccctggctacaaaatagggattcctggcctatttctgccaaatgctttgtggaagcagaaaatcataagccttgtgttttctccattatagaaaattaggccaggtgtggtggctcatgcctgtaatcccagcactttgggaggccgaggcgagtggatcacttgaggtcaggagttcaagaccagcctggccaacatgctgaaaccctgtctctactaaaaatacaaaaactagccaggcgaggtggcgggcatctataaccccagctactcagtaggctgaggcacgagaatcgcttcaacctgggaggcagaggttgcagagattgcgccactgtactccagcctgggcaacagagcgagactctgtctccattaaaaaaaaaagaaaagaaaaataatattccctctttcttggcccttggtttttggggtgcttttttgttgtttaataatggactttatttttattttatttttatttttgagacggagtttcgctcttgttgcccaggctggagtggaatggtgtgatctcggctcactgcaacctccacctcccgggttcaagcaattctcctgcctctgcaaatctgtagtttacattagggttcactctttgtgctatgcattctattgtgtttgtttgtttgtttagagacagggtctcactctattgcccaggctggagtgcagtggcgcagtcatggtctacttcagcctcaagctcctgagcctaagtgatccttccacctcagcctgccaagtagctgagactacagcatgtgccaccatgcctggctcattctatgggttttgacaaatgtaaaattacatgtagctaccattaaagtatcatacagaatagttgcactatcctaaaaatcccctgtactctagctagctattcatccctcccttcctactccccaaactcctggaaaccactgatctttttactctctatagttctgccttttccaaaatgttatatatagtatgttcctttttcagactgccttcttatacttcacaatgtgtatttaagtttcctccacgtcttttgtggcttgaatagttcatttcttttttgcactgaataatattccattgtatggatataccacagtttatgcattcacctactgaaggatatcttgcttgctcctaattttcggcaattatgaataaagctgctataaagatttgtgtgtggtttttgtgtgggcatcagattttggttcatttgagtaaataggagcacaacaatcacgagattgtattttaagagtatgtttagttttggccgggcgcggtggctcacgcctgtaatcccagcactttgggaggctgaggtgggcggatcacgaggtcaggatatcgagaccatcctggctaacacagtgaaaccctgtctctactaaatacac

SEQ ID NO: 1739 - DNA, 708 bp, Homo sapiens
aacttttccacacctggaactttggcgtaggagttcttttcacttttatgcatttcccgcgacattacagggtgagtacgtagcagatgagtgcttgtgagcctttcctctgggattcacacagatggctcactcctaactttggtgagtcattcagtggccagatgtttgcctctttcctcctccccactctacccccacaattcagtgtactgttctttgaatgacatcccctcttgtttttgcctctctttctcctgatgcaatggccaaaatgctggaaatggctgccttaaatgtagggaccattaggatctcgctcaacacagaacccaggccacctgtaataacacagctggctcccagtcctgaaaccctgcctttctgccctgaatggggtgcagagaaccagtccagacacctgaaactgccacccttcttcatctgtaggtgcaggggccctctgtatcaggaagagagcctctctgaaatccactgtcattctgggcttttcctggaccagctctccttacctacccccttctctagcctgtcagtttcactcattcattggacatttataagcactaagtatgtaccaggcatcatgctggcctttggtggtaccaacaaataaagagactgctaaatgcagaaaaataggcacagagtaaagacttgtaagtctgtaaaggagtgctcagtgag

SEQ ID NO: 1740 - DNA, 708 bp, Homo sapiens; identical to SEQ ID NO: 1739

SEQ ID NO: 1741 - DNA, 248 bp, Homo sapiens
ccagggtgggcagatcatgaggtcagaagttcgagaccagcctaaccaacatggtgaaaccccgtctctacaaaaatacaaaaatcagccaggcgtggtggcacgcgcctgtaatcccagctactcaggaggctgaggcaggagaattgcttgaacccaggaggcggaggttgcagtgagccaagatcacgccactgcactccagcctggtgacagagcaagactctgtctcaaaaaaaaaaaaaaaa

SEQ ID NO: 1742 - DNA, 1569 bp, Homo sapiens
acctgcctagactttcttacagtggtgtcctccctagcttgggctccttgggcagtgaggtgggctggggcaggtgagcctctccaacagccattgaaacacccgcaaccctggggcctggggtggtggctcacgcctgtaattccaacactttgggaggccaaggtgggaggaccacttcaggccaggagttcgagaccagtctgggcaacatagtgagaccccatttccaaaaaaaaaaaattagccaggtgcagtggtgcacacctgtggtcccagctactcaggatgctgaggcaaaaggatggtttttgccggagttcaaggctgcagtgatctatgactgggccactgcactccagcctgagaaacagagtaagaccctatctcaaaaaaaaaaaaaaaaaaaaaggaaaacacgcccatgggtccttgacctgctgccctcctcacctgcttctccccaaagactgtggggacttccagggaggagatgggctagggagagcaggtcccacctccattatctggacaggtgaggcctgggtatttccaattgcctcattttgagcaagagttttgatctgtggcctcctgccaagattttgccattctttcctgacaaactacacggctgttttgtaaccggcattataaaatggttttattaattattaataactatttaatgtgtacacagttatccatgaagaaataggaaataccagtgagttgttaccagcgttgccccaggctgggagagcccttccagctttcctttggcctctgacacccctgccccactgaccgcccaccccccattcctgtctggaaggctcgcctgccatcatcccgcacatccgacagctctcccttcagggtcacctcctccttggacaaagcatacgtgaccccttgtcaggtttcttggctgggtgctcccccagagtttggctcctgcccccaaccaagcatgcatggtgacaatgcacccacttgataactgatcactggtgtcacttccacctccctccctccatgagcgcaaacctccggttaatacagttgggtcagcccagggtcctcggtgtccccagagtctgccatgcctggtgctgggcagatactcaataaacacccaaaatcaggccgggctcagtggctcacacctgtgacctcagcactttgggaagctgaggcagggaggatggcttgagcctagaagttcaagaccagcctgggcaacatagcaagacccctgtctctacttttttttctttttttttttgagacggaatctcgctctgtcgcccaggctggagtgcagtggcgtgatctcgcctcactgcaagctccgcctccagattcacgtcattctcctgcctcagcccctcgagtagctgggactacaggtgcccgccatcacgcccagctaattttttgtatttttagtagagacagggtttcaccgtgttagccaggatggtctccatctcctgatctcgtgatctgcccgcctcggcctcccaaagtgctgggattacaggcgtgagccaccgcgcccggcct

SEQ ID NO: 1743 - DNA, 365 bp, Homo sapiens
tttttttttttgccaatctgctcaaacacccagttggaacaggaatgcctcgtggcactggctttaggagtttaatctagatggtttgctgtttctagcagcagagcacctgttcagactctacgtatatgcacccatgaatggtgcagctgccaagagaaccaaagctaaatgttggcaggatcacagcaggtgtggaggggaggtcactgggaattccctggagactcagtcgttacccactcaactggaaggctgagcatggctttttcctctgatggttacccatgccaggccccacctctccatgtccaatgttctttctttatttgtttgtttgtttgtttgtttgtttagagacggag

SEQ ID NO: 1744 - DNA, 14093 bp, Homo sapiens
ggtggcccctgtccaggctgaagaagactctggtaaacatagcattatgctgatgtcctctgcttgggttgatgtgtgtagtgtagcaagctgagctctgatcttggaaccgtagggaagtgtgtccactctccctgtttctgacccgtggggtttgggccagcggtccaagtgcgtgtggtcacagtaaaaacagcttctgccatctgcgtttactggcttatgagagctattcaatgtagtgccttctggcctgtggctcccttgctctcctacccaagttgagcagccactgtggtcactgctgctgatggggctgtgtgaagagaggacacaagaaggaaggggagggaaggtcgtctcttggattccaggcttacatgatgtggtagggtcagccttcaggcctgtgacttccgaggaggcagcacttttcttgcttctgagagcaatcctcctggtttcggctgtagtctgcaccttacaggggtccggagtgtgggcagctcctggcttgtttgcctgagagctcatagggcaagaagggtgactggactgaccttgaattcaggtatcctttggtccttcctaggccttcggcttaaaaaaaccaaaagtgctagtttgctttgggcagtggcaagaggagggagagctgacattgtaagatttgaagatgtgtaacagtggttagatttgtgataaatatgtgcttggatgtaaattgtggaaaactgagatttgaatgtaaaaataactgacatattagggtatcaatttaaaattaaaaaaaaaagtactgtatatctgaagagtcatcattgaggagctttggagagtccaaacataaagtgtttcaagactcacctaaagggaagtcggggcccagaagcgaaagggtctggccacatgtgcctgctgtcacctttctctttctcagatgttttcatcttgatttaggtgtttctagatctcttcatcagctatctcattaatcttgaatttgttcaacttcctcagtgttcattgcaaatactataatttagaatagcaaggatatttaggacttgtatattttctttaaaagaaaatatacctcactctatcagtacactaaatttagagacgtgttccttttaaatgactggcttatttaaaaatgagccagctcttcctgaagccagattcagcttaccctcgaagtgtaagcataaatttgattgtgttatattttgctgagtgcttagtggatagaagtgacagttgagtttctgcccacagtgtgtgtcaggtgtatgcaggttcttgggtgtcctttaatcctgactttcaggtgaccctggtgctaacaactaggatggcgcaccacatcattgtcacgcgcccatgacctcagtgttagaaatctacacagatgtctgggcacggtggctcacacctgtaatcccagcactttgggaggccaaggtgggtggatcacttgaggccaggaattcaagaccagcctggccaacatggtgaaaccccatctctactaaaaatacaaaaaaattagccaggcctggtggtgcatgcctgtaatcccagctactcgggaggctgaggcacgagaatctcttgaacccgggaggcagaggttgcagtgaggcaagatcacgccactgcactccagccttggcgccagagcaagagtcaatctccaaaaaaaaaaaaaaaaaaaaattccagcccggcgcagtggctcccgcctgtaatcccagcactttgggaggccgaggtgggcagatcacctgaggtcgggagtttgagaccagcctgaccagcatgggagaaaccccatctctactaaaaatacaaaattagccaggcgtggtggcacatgcctgtaatcccagctacttgggaggctgaggcaggagaatcgcttgaacctgggaggcggagattgcagtgagccgagatcgtgccattggattccagccaatggaatggccaacaggagcgaaactccatctcaaaaaaaatgaaaatccatacagatgcccctgttgcttgtttctgtaagaagcggctgctgcctcatcctggatgaatggagaggtgctcaggaggtgctgtgtcgaggatgtgctgtgtcaaggacctcgcctgtgggaaagcgaggcgcggggctggctttgtgctcacgaacgggtgttctgaaggcagacctgcctgaggggggcctcgagagtttggctggctgtgccatgtggtgcctatgcttggcagtgcctgagcaggtcctgctgccgagcattccacgggcttcttccccagactgcctttgcaccagcctgcagtggtgtggccaggagtgggcttcacgagggctgcttgcctggcccccatcacaccaggctggaactgcagctggtgagggcccccacgctttggctgctgactcttcttgcgcattgggctcaggcctagacctgaggtgaggctctgtgaatgcattggcagcagggcacggacacttacttgtacctctgcctgaggccttgctggaccctgtggagctgagcactcttttgctggtgtctcctgtcccaacagtagtgaggcttgagggtgacagcgtccttcagggcaacagtgtccttctgcaagatgttttttttctttgagttggagtcttgctctgtcgcccaggcggctggagtgcagtggcgcgatctcggctcactgcaagctccgcctggcgggttcatgccattctcctacctcagcctcccgagtagctgggactacaggcgcccgccaccatgaccagctaatttttttttttgtatttttagtagagacggggtttcactctgttagccaggatggtctcgatctcctgacctcgtgatccacccacctcggcctcccagagtgctgggattacaggtgtgagccaccgcgcccggccctgcaagatgttttatgaagagtccattaataaaaaccctgaacccctccgtaaagcagtcatgcaaatgataatattggatttatatttaaaataaacattggcatgttgaaattaatcatctctgtagaatttgcacttacaccttaccgtcttaggttgatattgtttggatgccttaggtcttggattaactgctattcctgggaacacctaacacatggaacagctgagcaaacatggaggaagcccttaatttgcatatataaatgttgtgttactacttaacatgtttaaggaaatgtttaaaaagtagcaagttgtttttttttttaagttcaacttaaattccacaagtctttgaatgttagtaaggaaaagattttttttttgtttttcgttttttttttagacagagtttcgttcttgttgcccaggctggagtgcaatggcacaatctcggctcactgcaacctccacctcctgggttcaagcgattcttctgcctcagcctcctgtgtagctgagattacagacatgtgccaccatgcctggctaattttgtatttttagtagagatggggttcctccatgttggtcaggctggtctcaaactcccgacctcaggtgatccgcccacctcagcctcccaaagtattgggattacaggcatgagccaccatgcccggcctaggaaaagatttttttaaaatactgggctatcaggaggcagaggttgcagtgagctgagattgtgccattacactccagcctgagctacaagagcgaaactccatctcaaaaataaataaatagataaaatactgggttatatttaaatttaatgctttaatacattaaattataattataaggccaggcgcggtggctcacgcctgtaatcccagcactttgggaggccgaggcaggcggatcacgaggacaggagttcgagaccagcctgaccaacaggtgaaaacccatctttactaaaaatataaaaattagctgggcgtggtggcacgtgcctgtaatcccagctactcaggaggctgaggcaggaggatggcttgaacccacgaggcggaggttgcagtgagctgagattgtgccactgccctccagcctgggtgacagagcgagactccatcttaaaaaaaaaaaaaaaaaaaaaaaaaaaaaaaatatatatatatatatatatatatatatataaaaaacagataaaacagatgctaatataatccctaaggttagatatagtcaccagtttttttgttgtaaagagatttgatctgtaagacataagccctggaaatcagcagggttacaggaaacccatcatgggctggatctgtatgttgaatgccctgggtaggttctcacagtgcttcaaatgcagcttttggagtggttttcatgtacattttccccattccccattccaaggtaatgtaaatgggaaaaaaagaaaccacacaaagaggatacaggaccctacagaagatgctgaagctgaggacacacccaggaaaagactcaggacggacaagcacagtcttcggaaggtaattgtgttccaggtttgcttgacctgtcagagtgtatgctctgtgactcttggtgccactgtttccctgcatgggagcacacatgagatgcaggtgtcagtgcacccagctccttccaggctggtattcagcagaaggcttgcatttcttacagaaccccattgagaaaggctgcttgcaggttcttaccctccaggggtgttatcacagaaaccgatggtgtgttgctctgcaagaaaacagacatccaaatgctttgagtaatacttgttttttagattggacaaaattgtcactaaaaataacctctttggccgggtgtggtggcttacgtctctaatcccagcactttgggaggccgaggcaggtggattgcttgaggtcaggagttcgagaccagcctggccaagatggtaataccccgtctctactaaaaatacaaaaaattagctgggcatggtggcgtgcacctgtaatcccagctactcaagaggctgaggcaggagaattgcttgaacctgacaggcagaggttgctgtgagctgagatcatgccactgcactccagcctgggcgacacagcaagattctgtctcaaaaaaaaacaaacaaaaaaacccccaaacaccataacctctctatagggcttattattcaggatgtaagtaatgaactggcatcaaagtccattagagatatgtgttacatgtcaataaaaagtcaacagttcattaaaggcaatgaacctagattttatttagtttattagtaattcatgttattgtttactgaatgggaatactaaacaggctgtgcaggaaaagtgcagcatagatacaaagccagccccgggtccttgtgctcctcgcttactgccagcatgtgtccagggacagagtttgcctggtacctgcaggggagtgaaaccaaccaaggaaacaccgggttattctgtctagcgtatggtgcccatgcatgtagaagacgtgagcccttttcctagtgtatgaagtggtgccattcatttcaactgtctcagatgtccggttaactttttcatgaactgagactttaattagactttgtactttgtttgaatttctattttattcgataatagttctggccgggtgtggtagctcacacctgtaatcccagcactttgggaggctgaggcaggtggatcacctgaggtcaggagatcaagaccagtctggccaacatggtgaaaccccatctctactaataatacaaaaattagtcgggtgtggtggtgcatgcctgtaatctcagctactcgggatgaggcaggagaatcacttgaacctgggaggcggaggttgcagtgagctgagattgcgccactgcactccagcctgggtgacagaaggagactccatctcaaaaaaaaaaaaaaaaaaaaaagttctgacagagtagttgtatatttgtgattttgagtaaagcttcatcctgtttttcactgatctgagttaaaatgctctttttatttcaaagaatggaaaatacatctcacatattgctaaggtgtaaatatgtggacaccatatcatttaccttatttctttaaacttgtatttgtagttgagaggagcaggcaggccctgcgccatttttctggcccacagaacattcttctggggcacctgccataggtgaggttgttgagtgatcaagtgttcagcagtaagctaggtcagattcacctgtagtcactaaggtttgtagttaccaggaagcctgcacttaacatttgctctggtcacctaattttttttttttttgagagggagtctcacttcgtcacccaggctggagtgcagtggtgcaatcttcactcactgcaacctccgcctcctcgattcaagtgattctcctgcctcagactcccgagtagctgggattacaggtgcgtgccaccatgtccagctaatttttttgtatttttagtagagatggggtttcaccatgttggccaggctggtctcaaactcctgacctcaagtgatccgcccacctccacctcccaaagtgctgggattacaggtgtgagccactgcggctggccaggttaccttctattaaagcagccctttgctggcaatcatactgaaactggttgttttgaaatatttgtgtaaatgttatacctaaaaaatacatgaccctagacactcagaataccaaaattcacattaagtggctagtaatgttttattagctcctatctcaggagatagcacatgataaaaagaagtaatggtgtcttgtctcttcagatttgggttttataaacctgagccaaaccacatatgacacccaatgtgcactgagcacttctgacatgctaggcactgtcccaagtgcattctcctgtcgccttgtccatgatcctctggattccacctcaccgcatcctgtctcactggctctggttccaggcaggtgggtgagatggagtatgagtgcaggagtggcaagtcattccctgggcagcgctgctctagtgctatggggacaggacagttttcagccacacctttcagaatctcagcccttgagaaaagcttcatgatcccttctcccatttcttgcttttctcagttgtgacatgttttactgatgatctttgttcattaggtgtatctggtgtttgtctaaaaattggaaatcctcagtatagtgatactagtaatgttggtcctgacttagcagggctgagtctaacttgattgggcacctcttgaatggaaggatccatttttctcatgttcatcctctgctttgggttcagtggagagtctaggtgcatgttcaataagactcgtatcaggtgtcttaaccacatgactgcagcgggtcttggcgtggccccacccacctcgccctcctgacagatgcgagagcgggaggtgcgaagaaagaatcagtccagattgtgaaaaaagtctgagattgggcaaccatggatgacttatgtgtggaacacatttccaaaggaagaagtttctgccacgaaacttttcagcaacctgtgttcattcacatgaggagattttttttcctttcttttccttttgttgttctttttctttttttttcctttttttcttttcttttttttttctttctttttttttttttttttttttttttaaataatagagagacacaatcactgacaaaacggccagaacaagctcttacaaggccatggaggcagcctcctcgctcaagagccaggcaggtaatgtggtcagcgccctttccttcttggcttctgggtgcccaggctgggctgggtgggtgggctgagagtgtgaaaggggaaggctggggctggtgaaggggaacagggcaggggaggaatccacaattaagctaggagtgaaaaagaaggaaaggaggttctcctgtggttgaaaactaaactgttttaatgtgtatgttattttgaagggtttggctaaattttattgaagttactttttacttggctctattatttgcaatttaaaattttactagaaaagtgatttcaaccagaagttttcaggtttcttacttgatggtgccagttgctactgtaaattctgtcacccttcagtaccctgaccctctgcatgtaagctaacagtaagggctcgttatttatatttcacatgctaaagaaactagcttaaaacctttatgaaaaataattgtcaaaaaaataagaggggaaattacacttccttttaccttttagttatctttttgaaatacctgtttgatcccttattgaagaagtcataccttctccaactcttaattaaaaggaaaacaaaaccctggggaggagagtggcaatggctctgtttttcttgttttgcatgaggtgcttgactggcttttaaaaatcagttaaacagactttaaaaaaaaaaaaagacatgagcaattggacatttgaacgctagctgatgatataagagcattgttacttttaagtgtgggagtagcattgtggttatatgtaagactttatgtttagagatttgtgctaaacttcttatggatgaaatgatatgtctgggatttgcttcagaataatctggcagggggacgtggaaccaggtatggatagagccacgctggccccaggttgatgtttttgggggccaagtagcgaggacatggggttcattgtacagtttgtctgcttttgtttatgttcagatttttccatgatagaaagttaagccagaaggacaaaggaattcagaagattcatctttagaacttcacttatttgaggggtaatttttaagcagtaaaaagatcaagggtttatgatttgaaactttacaaaccaaaattattttacagcaacgaaaaaatctgtctgatgcatgtaaaccactgaagaagcgaaatcgggcttccacggcagcatcttcagctcttgggtttagcaaaagttcatctccttctgcatccttaactgagaatgaggtaaaataataataataacgataaccatggcattggtatgaaggccatttagctgcccacgctgcagtgtgagtaatgctcagacttcataagcgcagcattggtgctcactgccagtgcagatgttttagggcctcttggctaactcagattcatgaaatggacaaacagtgcactatgttagtttatttgagcactttttatacacacgcacacagtgtctgtgtacatgtacagatatacttcagtcttgatgcagtttcatagttcttaaaatctgtctgaagaatgttgtgttctgtgtagccctcacactgtaagagttcacatggaagtaagtctgcgttggttctgaaagggcacagtgtcagttgagctgacatatactgggtggggtggaaggcgactcacacaccacacctgattcctgttgcttccagacctaggctcatggaggaagccaaagatttctttgttctcatgcatttcatggctttggtcctttaaattctggcacatttttagttacttgagtgttgaggtgagtcagaactaccattgtaatatgactcctgtgttctggacttgcagagtacatgatagcaaaataaagccatttggggctgctgcctgccatcattgtaacatgacacttagactttattatcaaacctaaattttttgccgttgccaaaaacaacaaatagccacagaacgtaggtgtgacacttttttgttcggaggtagttttggtttcctgatttttagggattaccttcatagagctttggagttttaatttcttgttatttggttctccgtgatgctgtttttctcattgtagacatgggtcctgtttttgtcatgtttatgaggagatgataactgggggcccttttggaacagggtagtgaggcaagggttggacaggccccttactcttgctgagtcagaaggcggcacttctggccaggtctctgccatggtccccaggaaggatggggtgtgcctcagttgtttccactcattagaggagtgtaggccttccagtgcaggaaggtcagggacctaggcaacctgggcggggctcatagagctctgcggcttgccactctgaatcctcagcgaccactcctccgagtgggattttctgcagggactcaaaccaactcagtggtggtcgagacctgttcacggatggtgggactggggctgctttacagtttgatacgtgtagataattaagcattttgtgatgtttggacacactggagaaaaggcagtaagaattatttactgaaacatctaggagcttactgaaatatgaaaaggcaaattttatacaaattatttttcctttttcctttctttcttgtccaagttcaggttaaaatcttagaaaattaaatgaaaggtcatttacagttccaaagaagaatattaaacatttttcacttaagttgagatttttgctttaaagagcttttaatgagtttttctgttatcataattttggtccggttattcacttgagttgttgcttatactgttgtcaggtacagtagagagaacatggagcctgctgagatcttctctgttattcctgatcctaagtcatgtatatcgaaggctttgatttagagtaatgcatgaggccagtgtagcggggtcgaggcctgcccatgagtcaggggagctcagtctccctggcctaggcagttgtcctgaccttgagaagacatagatgaagcattttatcatcattagacttaaattttaattcttcagaatgtcagaagttgataggttgttaaatacatttatataatacattaaatatgtgaaattaatacaccttcctacattttgaaggtgatgcatagatcccatagtgtgcatcatgttccttatatgaaaacgtttaaattactgggtcttttccattaaactacttttgtatggcttagataaatcttccattagtgttcatttttatagaattatgctgttaaaactactttaggtgaacaaataaacttgtctattatatattaacgcgactgaactacagtaaatgtttgtgatgtttccaatgctgaatgcctgttagcatatgaggcaaagtgtagtgttataaaaaacagcctgttgactgctgggcccgattctgatatgagttaggtgaccatgagaattgctgtttgaggtccacactgacacacacccattgggtcacaccccctttgcatgtttgtatttcctccctttcatcacatttgtttgaaataaggtacttttatagggttggtatttcagaacactttaggtcatgttgtagtttaaattcttcttgaaaaaggtatatgtgataaataaaaatttttattggaataattattacatggtactacatcaccctgaggaagagaataaattaaaattacacacttgcatgacaaaggcctgtgaaggaattaatgtgatttaagtgttttgtaacttcattttttattcctttagtagagcaaattcttatttttttcgccttcactggtaacagcttttgtgggagcccacaccagtcaagttggatttgaacccagctgctctgtactgcacttagaatgatgtaatattccaggatgctgctgcaggtggcgtatcatcgtacacactcagtgacatttctatcacaatcattttatggaagatgtgtgataatctgtttttactggtattaataaacacatacaatgaagaaaacagataacaaattttaagaccaaggtaagataactaatcaaggccatttaatccgtcacattcatctcataatagaaacacgttcatattccagtggtcaatgtagatttcaagttgaaaggcagtccctttagttgggggctgtccagagctgcagcagggctttgcacggaaggggtggccctgttagagttgcttctcctctagtttgtaacttactggacttttgtggaaaatatcagcgtcgctaccctcagaaacaaactaacagcacacgttaggaggagtcctcatcagctgttctcattgccagtgagatatattcagtattgtagatactacactaatttccaacataagaggcaggaagagttttgattctatccttttttactaaacagttttattatgacactagatacagtaaatttttagaaaaaaataccatttacagtattattgtgaaccatttaacccttttgatccaaggccccggaccaaggggatactgtaatcaggttatgtacaccaacctctgcatcagttgcttctatagagcatcagccctcatgtttcattgtcttaatgtcggggagcagcctggtgtcctgccccaggtgtccgcatttttgcatggtaaggaaaaggcttacttgcccttcagctcataaaagcagaaggtgtgctattcacagtaccatgcgagtagcccacagttaattcccggcagattctttggctgtgttttatctttaatgaacgtttctgactaatattttgttgtaaaccattaagtaatgtaacgcatgtaagatgcttagggtgcctggccaggactccgtggtttcctgttgtgacagtaataatggttataataataaaaatgataaaattgccatcattctatttttatccaaaagtataaattttgctttggcatgaaaagtggtcctcttgactgcattatgcatgcgaggatgaaataaacctagaagtggcagaacactggatttgtgtgtgtggcgctttagggtgctggactgtatggctgagggctggttgggttcctctattggctctgctcaaatgttgcaggatacatagccccaaagatggtctaggagcaatctaagctgtgttactccaaaggacatgaaaaagctcaagagtaaaattaaaattctcaaaaaaaaaccccacgaaatttaaagatggggaaaaaaagatggtataaaaatggctctggttcaataagcagtcacccaaagtaaagactctatcttgaaaggcttttggtgaaaatgaagggatttcatttgaaattacagcatgatgaattttgcatgggtggccagccagctagcccataactgatagatgcattagaagtcagccagcgcataggtgctccctctatattatggagaaagcaaaaccctgcaaatgaccaaatggtgtccaaagagcagcatgacattggcatcagctgaataaccaggggcacatgggggaacgtggatgggaatgatagtgtatctcagcggggggtggggtgacatcgttccctggggacattgggaaggtgggcaggggcaagtgaactcagcactctgcagtgagagggacagtcccatgtgtggcagcattgtcccacttcagatgccaggagtgggctcatcctagaggagcggagttttccgagaggaccatctcctggtttcctgaaggaggtgggtggaaacggctcttgtttgaaagaacttagggaggaccattggcttgccaagagtacagaaattcattatgctgctaatttaacgtggaattccttcatttcataagaacctcaaaataatggtgatacattctagccttaagacatttgaattgccggttgttgaggtgaattttgtttgtcatacatggaaccattttagtcccatttgactcacttcagaccatcttccacacactatgtctgtgcttggagaggggaggtggctctccagtgtaaaacttgaggcattcactagaggtgaaaacttgtcagaatatataaaagcttagattgtagctgttctaaaaacgtaagtactccattgtaatagggtggcatcttcaggtagtgcacatattggcaatagaggtcctgaattgtttttctaagactgatctgagagccattgggccatcaagcctttatatatctgcttctaaaattgccccacctgctctagatggatctttgggcctttcctcagtgttcatgcaaaaattaaatgtcttttt

SEQ ID NO: 1745 - DNA, 2318 bp, Homo sapiens
gatccacccgcctcaccctcccaaaatgctgggattacaggcgtaagccactgcacctggcggggtcttgcttattttaaaagaaatattctgattcatattttaggactttttgtcaacgaaattggttttgatccctttgggtaccatttttattgttttatgtagaatgttagaaattaccactaatttacctggcagtgatgtcaaattgactgtaattagcaggtagaaaattatttgtattatattcatctgattcctatactggatgagcaaggagcatgcttcctttgggacattcttacagcagggtgtctctccaacagcccgacaggcctcatctttttggttggatacctttgaactccatggttacgtgttaggtccacatttgtgtttttttctagcctacctatagttgttggcctttttgcatataactctcgggtaatattttgaagcatgctgaccatccaggcatatagtattttcaagaaatgactgaggtaggggtgggggtcctggtccggctgatgggggtttgctcagcactgtgccagtggaagcaggtgtattgtgggcagttttgtcattgtcctcaagtccttcgcagacagtgcacagcctgctgtctgcagtcggccagaccaggctcctccccagcacactccctgtgggatggccgctgctcaggacacagtgggacaaagttgggttgataggatattttagattcattttacctttgacaagggcaggccttgaattgggagcagcagccacctggcctcactctggccacaggtgacacttggtccttgctgccacctgcttggggctatgtggctacggctacacaaaagcctgtgcaggttagaagacgactgtggtgtgcagtggtgctctgggagtggagacttcctctgttctcagagactcacccccagccctgaccctagaatttagggatagccaggaagtttctagtttgtgtaacctagaagggtcactttaataaaaattgttatgaactatagtattttagatgatgagtgacttattttaattccactttaacattttactgtgctgttaacttggaagacctgtttgaaattagtcttgatttcacactcatttaatctgctgagcacagggctgttgtcatttgtaaacgcaaacactgtggaggtacttctcgccatcagcttccttctttacaaaaccatcatttcaacatgaaaattatgtcagtttatagaaatatttattgttcaaggtctgtaattgtatttcaaaaacgatgtcgtattcaagttgtgaagggatttgttttgtcaaaaaattaaaaactcaatgtgtatgacgccactctgaagagtaggtgagcgctttgcagtcacagaaggtggcatctgactgcggctcatacaggtcaccctgaagggccacgtgcttttagcagttggctggaatgtgttcactaggttccgttatgtttggtaatatcatcttgaaaagtccctgttataggttcaggagactgcattccctgccctgaaggaatgtatttctaaggcaaataggcaacttggtactatcttattctgagtagagagtggagaaagtattttcagactgaagaaaactttgaaaagtcaggagctaagctgctcggagctcagtgccgcagcatggctgtggtggacgcgggaaacaacgggaaagttcttgacagagtctgtgtccgctcagtccctgcacttttcctttccaaatgcatctcgttggatatggaatagatcgtagatgttgtagactgagatttgggactatgttgggaccgtacaggtgaatgtgccacctccacaaatggcttctccgagtgagtcacgtcacctggtgcgtggaggtggagcctgcggctggagtaaggcttgctgtgggacgccctcgtactttgctctccttgcgggtggttgccgagccgagagcattggatcctccccgactgtggctagttgtctgtccggtggctgggagggggtgtggtgggaaaaagtcggaatctctgcaatctgtgtcatggactgtactattgtaaggtctatattctgtatgtgggtcccagaccctgatcaggaaatgagcctcatgtgtgtcgttaacatttatatatttccattcaaaatatgtattcagtgtttatttcctcaaaacagactttgttaatgtaggaaatctctccaagtggaaacgtgctaactttttctgtaaatctgaaataaaaggtgctgttccttcctctgacccag

SEQ ID NO: 1746 - DNA, 3613 bp, Homo sapiens
aacaagaagaccaacccagggatgggggaggcttccctgagttcacgcagctggaaaccctgcctgtattccaggacagctggccacctggtggactcagggttatatgcccctgtccaccagggtatgtggctctctacagctgtggataccctgtgccaggcccttggagcccctggaccccagccatgttgcccctgtccagcttctcccacttacctgtctctctgttgcagggtcagcctggcaggaaggggtttcctgggaggcccggcctggatggcgtgaaggtgaggggacctggagatccctggggacaagaggaaagaggggatcctacatatctgggccccaagtcaagccccaaatcccatggccagttgtgaaaagggagaaaaaaattggttcctgtttagaacaaagtattggtaagggagaaaaaaatggacacaacctaagtgtccaactgtgggggattgttcaagtagtgggatatagtccagccaccctagatggtgtttcgggctattttacaagatgggaagatgcctgaatgtggggtgggggtggtggaggaaacaggttataaaagggaatgctcaagtgtgagcctgtggcaggggctgggttgcaccgtttctgtttttttctttcatttttttttttttttttttgagatggagtctccctctgttgccaggctggagtgcagtggtgcaatctcagctcactgcaacctctgcctcccaggttcaactggtcctcctgcctcagcctcccgagtagctgggactacaggtgtgcagcaccacgcccagctaatttttttgtatttttagtagagatggagtttcaccatgttgactgggtgcagtggctcacacctgtaatcgcagcactttgggaagctaaggcaggcggatcaagaagtcaagagatcgaaactatcctggccaacatggcaccctgtttctttacgcacagagcagaggctagaaagtggacagggattatctctgggtggtgggacaataggagattttcattttcttctgtgggcctctatattttccctattctgcataataaatagatagtacatatattaacagggtttttaaaaaatgttatcaaaaaagacctggcccaagataggagagtaatggtcctcagcccatgggcagcctcacttaatagtttcccaaggactcccttaagttggagttttcccagccattctgggcaaaagattgtcgggtcaagtttacagatgggcaaacccacaggaggttaggacagagccagggggagcgcaggtcatccatatctccctcccttctggggaaatggcccacttatctgtcctggcccctctagttttcatgaggtccagggaggagccgaagggggaggaggctccacccaggcttgcagtaagccacatccatgtatgcgccaaactactggctagcccgagcccatgtcctgccgtctgaggtttcggcctctctccctcagataccagttgggtttctgtggtgggagtggtgacatcgtctgtgtggatttgtcccacagatctgctgtgggcctgaggagcaggagccatctcagcatgggacaaaacagacagacaaggccgagataggccacccaatgtgaaagtgggacagagccttgaagacaaatgagtctgatttcccttttttatagctggggaggctgagcccagagcagagatgggactcaccccagccacccgtgagctggtggcagagctctagtgtgttgaggtctaggaccctggtgccctgacgtcccatttccctgctcttcctgagatagggcagcctgatgcagtgggaatgtgcattcttgttttttttttttttttttttttttttttgacagtctcgctcttgtcacccagactggagtacagtggtgcaatctcggctcactgcaacctccacctcctgggttcaagcaattctcttgcctcagcctccccagtagctgggattacaggcatgcagcaccacacccagctaattttttgtatttttagtagagatggggtttctccatgttggccaggctggtctcgaactcctgacctcaggtgattcgcctgcctcgggttcccaaagtgctgggattacaggcgtgagccaccgcacctggcccagaatgtgcatttcaaccgggcagaccaaggtttcggttctagccctacctctggctcactgtgtgacctcaggcaggtcacttcacctctctgggcctcattttccacctccacaaaatgcaatgggcttctgaaggacctagatgagacatacacatccaggtgctgagtaagccaaggccccctcagagggaatgggtgactagagtcatgtctgcctgaggttctgtccaagtacccctttgactctgcccatttgttgggggtctccaaggccacacactggagataagatccctggttcatccccactaatggcagctaaggccagcaggcctgggacttccccaggaggtctagactttcatctcccatcccaatccatcctcctctttgtctctttgcagggggaaccaggggatcctggtcggccggggcctgtgggagagcaggttagttagcaacggtctctgaatgagtggctccatttattgggcccttactctgtgccaagccctttgcccagcaccctccatgcaccacctcgtgtaattctcagaacaactccagaggtaggttcagtcctctacccctttcacgaatgtggacggtgaccctcagaacggggaagtctgtaaatgagaaagctgtggatcatagtcacgacagcttttccccacagcctgactctacacacaggtttttggtgcatttgcccaaagaggttatgtgactgctcccccaggacattaaaactggaggagcccttggcagtcgttgctcgtgttcccatcagcttatagatcaggaagccaaaggccagagaagtgttaccacttgccaaggtcccttggtctaggcatccctaaattatatagaagatgaaatccaaaccagtggctctggctggttgagaagctgggtcaaggtctgaagaagagaagaggttgcaactagtcattaaaatgaaggtttgaggatcacgaccttcaattaaagtccagagaaacagctctgagggatgggcagagggacagcttcaatccttcctgcccagccctggggcctcctgaaagcttaacctcttggctccaaggtggagaggtgttcatctcctccactcctttaaatatggagctcattcctggaaggggcttcctcaatccggaaggactgatgctggggatggccatagaggaatttggccgcaccacgaaaccccgtcagtggcgtgagagtcacacacgatgggcttcctcaccaggcctgccacatctgttgggggaagaaaggaattaaaacagggggaggcctggatttttgaaatctttccagtgtcattcgagcgcattctgtgggaagcccgggagtttggataggctgccgcggcctggatatatttcctgattggaaaaaaaaaaaaaa

SEQ ID NO: 1747 - DNA, 11282 bp, Homo sapiens
gggtgaacaaggggttccaggtgtgtcaggagatcccggattccaaggagacaaggtaattgcatgagattttcccctccccctgcccctgcccctgccctgctgttcccctggtcctggcttccttcctagggtccatcatgagcaaggacccacctgtaagacggctgccctcgaaataatccagtcttctccatccttgatcctcttgtcatctcttccttggactttacagtgtgaccttttaacttatttctgggccccagcctcttgctttctctctttcttctttactgctacccagttgttcttctgagggcaaagctctgctctccgctcacacaccatccatggctccctattgctctcagaatgacaccctggctccctaaccagacatcaggaccccagtgagtgcatctctctgatgttctcctgctccccgccttacagctctgcactccagccccactgaaccgcctgccgtgggcctctgtacacacacacacacacagactgctacccgcccgggaccccctccacccagcctctccacaccaccctgctcagagccctttttccccacctgctcagaaagtggccatttccctctctagatgctctgagaggcatgtcctcccctcactggtggtgccacctttctcctctgattttgggggacttgtactgtgtcccctgccagacagtgagttccctaagaacaaggctccagactgccctgatggagctcggctcagggtcctgtccttgatcatgaatatttaggataaggttgagggagtaactggccttacaaaatgacatattgactatgggatcaaactgaggtggccttgacttccagagcccagctgtgggcctgctgagactggctcccctttgcctgtgtctggcatcatgtggccacatctggaactctcccggccagtcaacgaggcccagatgttggccagctctccctcttcctcttccctccctcctcgctggcctgtcctgacccagccttggtatctccgggttgtgaaccacagcaggcctggctcttccctactggaccctgtctccagagttccccagaagtcagaggcaccacagagcctgcgtgcagccccagggtccctgattcttcctggtgaggacaggggctgctgtttcatgttagcatttcctggggcccagcctataggggtgtcaggcaggtgtgatccaagccagagcccacagcagggaaaggaaggaaggagctcatcttcctccaaggcgggcgttctctgggcctgggaccagcaggaggactgggcggctgttcacctggccatttctcttcctcactaaccccagcctgctctggatctcttccaggggagccaggggttgccagggttccccggtgcacgggggaagccagggcctctggtaagtacctgctcctccagcacccccaaacctcacactctccaactgatcgtgtaatgtggctggggacaccttcacctccaagacttcatttcctcctgcagcagagctcctgggggcaagcagggcagggcaggaatgggatgtgctcatttcacagatgaggatactgtgagaggctcagtaactcagccagcttcagaggcaggcctcatttgccgacaaagctctgatgaggatctggggttcctgatgccttgtaaacaatagtgatgttatcagtaacagcagtggctgtcatttattgagtgtcgctgtgcatccgaccctttctgaactgtttctttgaaggctgccaactaccccaggagtgagggaattaatattgctcccattttacagatgggcaaactaagattccgaaagttgaagtgacttgcccagggtcccatggttagcaagtgcaggaggcagagtttgaatggtagctccttctagttgtccaggcagattttatgcacatgcttctgaactttccaaccatccacaaccagcgggggaacgcagggggttcatggaaggtggggtcctcacccctgcctccctgcaacctcttctcttccacagggcaaagtcggagacaaaggatccattgggtttcccgggccccctggacccgaggtatgtgatgccccatttctccgtgtctggctgctgctgggactcggtcttgtccttgggaaactgaggcccagggatggggaaagacttgctttaggtcacacaggatatgagagatgaggctgagaggagaaactcctagatcagcaatcatttattttccccttctgctcttctgctcttactcaggggctctcaaaagtcaacagggccaaaaggtggcctcagagtcctctgccaactttgtggccaccgcagctttgtgattcatgaaagccctctgtgcgccactgtctggtccctcacaggagcttcccacattctccactcagagttccctctccaagccctggaactttcctagccacccacagccactctggaacggttcagggctcacagcttccgggtatggggagcaagaggtaaatgcaaaattcgggcttttgaatgaagaatgagaaataaggatagatttagcaattaatataataactctagttgagtcaggagagagcctcacggtttctgatgtgtgtgatcattggcataggtaggctacacctgaatgatcaactcggaattcacatgtaatgttgcgaagcaagctggctgggttctttttgacgcccccgtctttaacaggggtctcgtgtctagagagctgggctgagcaggagccagggctgccatccctctcaggatcattggcacccaggccaacctcagttggagccccccacccacaactccctagcctccaggtcttgctcacccatgaggtctctgcatccaagacaaaagtgtggctctgtggataggccggaccctgccaaagatcacttctgctatcactcggatggatgaggaaatgtttcctaaaagctacaagttctgactttccactctgttgactttggccatgacacagtcctatctttagacaaatggacttggcctctcctccatggccccaattccctcctctggtcgctggaaaaaggcttttctgagagtccagctttcccagcattctggcccgtgagggtggaaggcatgctccctcacatttattaggcacctcctggtgccaggaggctgtgcagtgtcctcgagatgagaacttgctgaatcgccacgacagccgcatgagggggatattaccaccaccagtttacagttgaagaaactgagtcacagagcaggaaagtggcttcctcagggttgctctgctatgtaggaacaaataaggtctgctttggccctttcctgggtccctggacaatttagccatcagcctctcccgtctttgtgctctgttttgattggctgactctgtagccgagagatagctctgctcagctgaagggggaagctgataagcgcggaagctgataagcgcgtcagcaccctgcctgcttctttccctgagaccatgggagggagctccagctctccagcacccgggtgaattatctctcactcatcagtgggttatatgcaagtgagcatcaggatttgctcagcatcccgactgctaagttctcacttagagatgggcccaccccaggcagacttcttttcccagagtacaggacccaaaatcattttggatgcagatttttactgagcacttgcaactttgctggttccatttaaacttaagactagccctgtaagggaggtgttacgagcaccattttacagatgaggaagctgaggcccagagaggctaaggaacttgcccagggtcacacaggaggagggcagggctctgggaactgcgtaacaggtctccaaattgtgcaaagaccactgtggggagagggagtccctgtgctctgtggggccctaaggaggagcacgaggatattgcagggaagggaggtgattccgctccatgtgggaagaaccttctattgtacagtcatcccaggggaatggccctcactgggaagcagggagcccccatgggtggagtggggcagagtccaacacatgtggccaagatgtaggaaggacttaagcttacgatgactggagctgaggttaattaaatcagtgcttttcaatgctttcaaagtcacagcaaacccagaaaatcatcctctttgcaggattactgcagtcaaaagacaagacttctcagggcaaggcgtggctggctctggggagcaatgtccccagacacccataattctgacccagtagcagcaccggatttgagaaataacgaccttgagtgtgaccttccatgttacaaccttaatgctttcctgcaccgtccggtgtattgtctcagcaactctctgaggtgtcagggctggaaccatgcaccctgttttagaactgaggactgtgggatcaaggtggttaactgacctgcctggggtcccatcccagcaggatgagatggaaacccggtcagtctccctgcaagacgcatccccgtagcactcccttcacagcccccgtgggtgaccctgctctctgcttcccctcagggattcccaggagacatcggcccccctggcgacaatggcccagaaggcatgaaggtgagtacctgcccagggcagctccagttggaggagcagacagctctgcagaaaccacaggggctggctgcctggcttggaagcaggggttgccttgccagcctgcgatggagatggaggtaccgcctctgagactccctttttgttcccttctccccagggtaagcctggagcccgaggcctgccgggaccccgtgggcagctggggcccgaggtgagactgtctggccccctccactgcccatcctggcctgattgcagcccccagcctgccctgtcctgggtactgaaggccttagcttgggctggagccccctcagccaggacaccacccagggcttccccagacttacccaccagctcatcctatacagccctgccccgtgccccttccagggaccttctctgccctgctgtcacctggcagggtggcttccccgcaccctccctcctctgcaccctcgtcaccctggggttttctttcccagagctactgacaatgccgtgctcgtggtagcagtttatcagggcattaatgagggagtaggaagtgtcagccccattttacagatgaggccactgaggcccagagaggaaaagagactcagtcaggtcttatggttagtagcaggcagggctgcaatgggaacccaggtctgcttgagcccaaagcccatgacatacgtcctatgctgtcaactctgtgctttctgggagtggccttgctgtcaactctgtgcttcctgggagtggcctaggggcacctccagaatattacaatgacttgcacaattagttagtggcagagcatcgatttgcttatttatgtgcgctggatgaagtgggttgggaggggtctctatggggctgttggagcaccaggtgggcacttaatgggtgggcccctgattttgccctgtgcacgaggccattcttagccttcccatgccccacctaccttagctcaggcgccaggcccccgtgacacacagccctgggctgagggtgcgggaagcccagattcaccgcgaccgcaggcgggcatccagctgacatggatcccttctcgggctggctctgggtctggcggggtcccagcactggctctgggagccaccacgtggagctgctttcctggaagctggggaaaaggagctggggggtgtctctggagggagccccttggtcaggcctggcatgccagaaggagccaattaggaggctgcctgagcctgtgggggtggggagcacctggagagtctcatgggccggaagcgggaaggaaggggagaggagggaacggcaccagccacatgcttctgtctacactcacattaccactcaagaaagccctatgtatgcctgccacttgttcacatcttcattcattcattcattcactcaccaaacaccccttagacacggcaccatcccaagtgatgtttgggggtggctgcaagaaagaataaggcatcactgctgacctccaggaactcagctgaagccacttattatatttgaggatgatcttctccaatctgggaaactgagacacagtgaggctgaggtctgccagtgagcaaatggcagaactcagagcctacatctttgagctgcagtttgaggctctgttcctcacagcacacaacggggtttaactctcatgcccagggcttccatgaagcctggagtctccattcactggaagtcactgtgtagcctggcctctaggccatggccagtggagcctctgccctgggtggggccaggcaggtgggccaggcgtgctgtttccctttgtccaggagggctctcctctgtccatccctttccctccatacaggacaagatctctgcaagtccaactggattaactttctccttttttcctctctcgtgtctcccaattctagggagatgagggacccatggggccgccaggggcccctggcttggaggtgagtgtcactggcctggggtaggtggcattcatgggagctgagccagctgtgcacaggcagggcaacatctggccagtgctccagagggaagtcatcagtgagggccttggaccagccagagagagaactaggacagaccccaaaggagagagacaagagccaagaaactgactgtcactgcccacctcctatgttccaggtgcttcatgtcagtatttattctccttgattctcccatgacacatgattgctttccttggtttcattagagaagaggcaaacgagagtgaaggctttagctcgacatctcacagccaggcagtggggacgccctgcctgggccctcagcccgagccctctgcactcttccaagctgccttcccaaagtcacttgtcctacaccccttcttggtcccagccattgcataaaccagcagctcatgaaatttctggtatccagagctttttacactcttgaaaatgatggaggacccaaaggcttttgtttgagtgggttacacctactgagattagtaattaaaaccaagagactttaaatgtatttattcattcattgaagattaatcataaactcatttcctgttgataaaaattatatttttaggagaattcacgctattttccatagcaaaataattgagtggaaagagtggcattgtgttaccatttttgcagatctctctttaatgtctggcttaatagaagtcagctggcttctcaactccgcttctgcattcaatccactgacaatattgcgcgccatgcagcctcgggaagatgccacttaacattcaccagagtgagagtgacaaaggcgaatgacatcttagtgttatcatgaaaatcattttgacctcctgaaccttctgaaagggcctccgggacccctgtagtcctcaggccacactttgaggaccacttgcataaactgttccttccctgcaccccccgatcatctgccaagttccttcctttccctcactccctgaaggcaggtgtcatcttcctcatttacaacaagaagaccaacccagggatgggggaggcttccctgagttcacgcagctggaaaccctgcctgtattccaggacagctggccacctggtggactcagggttatatgcccctgtccaccagggtatgtggctctctacagctgtggataccctgtgccaggcccttggagcccctggaccccagccatgttgcccctgtccagcttctcccacttacctgtctctctgttgcagggtcagcctggcaggaaggggtttcctgggaggcccggcctggatggcgtgaaggtgaggggacctggagatccctggggacaagaggaaagaggggatcctacatatctgggccccaagtcaagccccaaatcccatggccagttgtgaaaagggagaaaaaaattggttcctgtttagaacaaagtattggtaagggagaaaaaaatggacacaacctaagtgtccaactgtgggggattgttcaagtagtgggatatagtccagccaccctagatggtgtttcgggctattttacaagatgggaagatgcctgaatgtggggtgggggtggtggaggaaacaggttataaaagggaatgctcaagtgtgagcctgtggcaggggctgggttgcaccgtttctgtttttttctttcttttttttttttttttttgagatggagtctccctctgttgccaggctggagtgcagtggtgcaatctcagctcactgcaacctctgcctcccaggttcaactggtcctcctgcctcagcctcccgagtagctgggactacaggtgtgcagcaccacgcccagctaatttttttgtatttttagtagagatggagtttcaccatgttgactgggtgcagtggctcacacctgtaatcgcagcactttgggaagctaaggcaggcggatcaagaagtcaagagatcgaaactatcctggccaacatggcaccctgtttctttacgcacagagcagaggctagaaagtggacagggattatctctgggtggtgggacaataggagattttcattttcttctgtgggcctctatattttccctattctgcataataaatagatagtacatatattaacagggtttttaaaaaatgttatcaaaaaagacctggcccaagataggagagtaatggtcctcagcccatgggcagcctcacttaatagtttcccaaggactcccttaagttggagttttcccagccattctgggcaaaagattgtcgggtcaagtttacagatgggcaaacccacaggaggttaggacagagccagggggagcgcaggtcatccatatctccctcccttctggggaaatggcccacttatctgtcctggcccctctagttttcatgaggtccagggaggagccgaagggggaggaggctccacccaggcttgcagtaagccacatccatgtatgcgccaaactactggctagcccgagcccatgtcctgccgtctgaggtttcggcctctctccctcagataccagttgggtttctgtggtgggagtggtgacatcgtctgtgtggatttgtcccacagatctgctgtgggcctgaggagcaggagccatctcagcatgggacaaaacagacagacaaggccgagataggccacccaatgtgaaagtgggacagagccttgaagacaaatgagtctgatttcccttttttatagctggggaggctgagcccagagcagagatgggactcaccccagccacccgtgagctggtggcagagctctagtgtgttgaggtctaggaccctggtgccctgacgtcccatttccctgctcttcctgagatagggcagcctgatgcagtgggaatgtgcattcttgttttttttgtttttttttttttttttgacagtctcgctcttgtcacccagactggagtacagtggtgcaatctcggctcactgcaacctccacctcctgggttcaagcaattctcttgcctcagcctccccagtagctgggattacaggcatgcagcaccacacccagctaattttttgtatttttagtagagatggggtttctccatgttggccaggctggtctcgaactcctgacctcaggtgattcgcctgcctcgggttcccaaagtgctgggattacaggcgtgagccaccgcacctggcccagaatgtgcatttcaaccgggcagaccaaggtttcggttctagccctacctctggctcactgtgtgacctcaggcaggtcacttcacctctctgggcctcattttccacctccacaaaatgcaatgggcttctgaaggacctagatgagacatacacatccaggtgctgagtaagccaaggccccctcagagggaatgggtgactagagtcatgtctgcctgaggttctgtccaagtacccctttgactctgcccatttgttgggggtctccaaggccacacactggagataagatccctggttcatccccactaatggcagctaaggccagcaggcctgggacttccccaggaggtctagactttcatctcccatcccaatccatcctcctctttgtctctttgcagggggaaccaggggatcctggtcggccggggcctgtgggagagcaggttagttagcaacggtctctgaatgagtggctccatttattgggcccttactctgtgccaagccctttgcccagcaccctccatgcaccacctcgtgtaattctcagaacaactccagaggtaggttcagtcctctacccctttcacgaatgtggacggtgaccctcagaacggggaagtctgtaaatgagaaagctgtggatcatagtcacgacagcttttccccacagcctgactctacacacaggtttttggtgcatttgcccaaagaggttatgtgactgctcccccaggacattaaaactggaggagcccttggcagtcgttgctcgtgttcccatcagcttatagatcaggaagccaaaggccagagaagtgttaccacttgccaaggtcccttggtctaggcatccctaaattatatagaagatgaaatccaaaccagtggctctggctggttgagaagctgggtcaaggtctgaagaagagaagaggttgcaactagtcattaaaatgaaggtttgaggatcacgaccttcaattaaagtccagagaaacagctctgagggatgggcagagggacagcttcaatccttcctgcccagccctggggcctcctgaaagcttaacctcttggctccaaggtggagaggtgttcatctcctccactcctttaaatatggagctcattcctggaaggggcttcctcaatctggaaggactgatgctggggatggccatagaggaatttggccgcaccacgaaaccccgtcagtggcgtgagagtcacacacgatgggcttcctcaccaggcctgcaacatctgttgggggaagaaaggaattaaaacagggggaggcctggatttttgaaatctttccagtgtcattcgagcgcattctgtgggaagcccgggagtttggaaaggctgccgcggcctggatatatttcctgattggaaaaaaaaaaaaaa

SEQ ID NO: 1748 - DNA, 1730 bp, Homo sapiens
ggtgaaaccccgtctctactaaaaatacaaaaattagctgggcgtggtcgtgggtgcctgtaatcccagctacttgggaggctgaggcaggagaatcgcttgaacctgggaggcagaagttgcagtgagccaagatcgtgccactgcactccagcctgggcaacagagcaagactccctctcaaaaaagaagcttgcctgaggccacgcagctggtaagtagaaagttacctggctccagagacctcaactgtgaagcagaactaagtcagaaggtcagagctggtgagactctgggaggtcacatttcacagttcctacgtctcacagatggagaaaccaagacccagggagagaaagagatttgcaggcccctggactcttagaacattagaattgctgggtgaaaatggacatctccagattgttttactcaagcctatccctgggtagccagctgggtgccatgccaaccccagtcctttctctacctgtttctacctcttccatctcctcctgtcatgcccaagcctccagccacaacccacctctgccccccttgccctgctgtctgctacacctttctgccagagccctccctctttgaaggggctttctgatggaggcagggggttccccacacctacctgtttatcccaaggtttgagacatcagcgctctggaaatgttgaagtcatggacgagagagaaaggaagctggggaaaatgagagtgtaggcagtgagctctttataggcccctttgcagagctggtctcagctcagcgttgcttcaggaacatggaaataaatgtgttacatggaactcggctggcttgctgatgggagttgcctgggacatttagagatgtgaaaactctggaaaaagaaaaaggaggaggaaattattttcatgcccatagtttttaggaaaatcaaatgtctttaggggaaaaaagagagagagggggagaaagaaaccccttttcctttggtggggaggagccttaaggctgtgttccgatcagccacgcacacatccgtgtcccctggccctaccctgggatgacagagccatcccttcacgttccaaggttgctcctgcctcaaatcccagattttccatgacccagcctggactcagtcccacttacaaccgcttggctccctctctcagcctggagaagcattctggaagcaaagctcctgctccgagcccagctcccttcaaattcattgtcctgatttcctaggtgccttttaaactttccttgtttttctattttcactcctttttttcaccccttcactcctctcttggacattaaaaaaaaaaaaaaaaaaaaaaagtcctgtggttccccaaataccaggatgttgtacaggattttccaaattggaaaaaccaaagtaagttgaaaaaaaattttttttttaattctgacttttgttctactaaggaagttcttttgttaggtcatggccttagccatgtgtgggttttctaaggttttccatttttcctgggtttttctccccattcttcctcctgctcccagggatgtaaatgttttcggaatcctggggctgacagagtgtcagtaatgtccaacgtggagggctggatagagtgaggccagggctgtgtgaggtggtttcggccctaaggggaagcagctcccaatctggactgcctgttcagaatatggctaaaaacagggagggagcagaa

SEQ ID NO: 1749 - DNA, 531 bp, Homo sapiens
tacaaatagcctttttgactgagaaggaaaagagaaattcaacaacatcaaagaatgggagtgactaaagtgtgtttttcagctggtacataggagccagtagagagaaaaggttgaagatggagggaagagaagaaccagttgttaggacaaggtgccagggatgttgggaagaaaacagatccagcgacatatgatggagggtggacttaactaccctaagatttgagggcaacaaatatttgcttggggcatgggagtgattaggatggtggcttaaggagagtgacaaaaattttagaatagctgctaaagggagaatgaaagcaaatgaaagagttgtctgccagatggtgttaagagcccatctgaaagtgaaaaccatgaattgttcatcacatcattcaatctgcatgggtagatgctgcctttcatttgaaagcagcatatttctttccttaaaaaaaaaaaaaattggctgggtgcggtggctcatgcctgtaatcccagcactttgggaggccgaggtgg

SEQ ID NO: 1750 - DNA, 309 bp, Homo sapiens
tgactttggtaattcagtcacatctgctaagtctttgtcacagttgggatcacgtggaataatcgcttgaacccaggaggtgaaggttgcagtgagctgaggcgacggccactgccctccagcctgggagacagagcgagattccatcttaaatttaaacatggggcagctatcaaccaaagtcaaaagagaaacaaaaatataaggcatctgttaaaacattactttcaagtaaatgtaagcaggttttgaaaaattaattggctgcgtgtggtggcccacgcctgtaatcccaacactcagaggccg

SEQ ID NO: 1751 - DNA, 239 bp, Homo sapiens
cagatcatttgaggtcaggagttcgagaccagcctggccaacatgccgaaaccccatctctactaaaaatacaaaaattagccaggcgtggtagcaggcacttgtagtcccatctactttggaggctgaggcaagagaattgcttgaacctgggaggtggaggttgcagtgagcccagatcacaccactgcactccagcctgggtgacagagcgagaatccatctcaaaaaaaaaaaaa

SEQ ID NO: 1752 - DNA, 288 bp, Homo sapiens
gattacaggcgtgagccactgcacccaggaccaggtcattcctcatacctccaattcttaagagttattgtcagtctcaagtaggcacattggaagtatcttttgcttgagtgatctgaaacctgaaaatttattatttttttttcttttttagacagagtctcactgtcacccacgctggggtacagtggcatgatctcgactcactgcaaccttctcctcctgggttaaagtgattctcatatctcagcctccaagtagctgagacaggcatgtgccaccacaccc

SEQ ID NO: 1753 - DNA, 362 bp, Homo sapiens
taaatggtgtctgataagctatattgttatagaattatgtctgcgagaaagcagaatgtttccaagtcaataagagcaagctttttattttaaggtaatgcagtggagtccctttaaaagtaaacttaaaaggaataccaatgtgtgaaacagattagaatggaaattctatatttgaaacaggtaatgggatggccaagtgtctctgttccctcataacccctgacaagaaacttctttaaaactatgaaacagcctgaaatatttatagtgtagaataatagaaaagtagaaggaaaggaagtgatatttataatgagtaggacaatgacataaccaaaataaagcaattcttcaacatt

SEQ ID NO: 1754 - DNA, 1802 bp, Homo sapiens
agtttatatggaaatgcaaactgggctggaagatattcctgagttaggctttctcttcatattcagcttgcacatttggtaatgtttttaagatgatcatctaattttattttgtgaagtgaaggatttgtgttttagttggcagttgttaagtccttggcttgccatttttcaaaaagtaaaaaggtcctcacaggtgtctccatacttcgccaaggttgtagcatgggcagtttcagtttcagcctaagagactggtgacatccacaaatgcagttttagaagcagaaaaggtcttggtgcctctgcagtacttgatgtattggggtcaaatctctacaaatttttctgtggtgatagcaaaatcaagagatggcttacaaaaagaaatattgaatttttatttttgaagtttttgttttttaaaaggttgggggtgttcagccactgagggacaaaacttagcatctaatttcaattatagtgtcatgcagagtatttctaaagtaattggttatcatgggaaagtattctcttttcaagaagttctttgattctgtaataactagaacaaataaagtagtaaaagaagaaatagttctgtgactaggaaaaaattgcttttgagagaacatagatcaattatactacttctaaggtagctgcagataagtggccttgacacattacaagcccggaaaaaaacatcagaaataataaaaaatttcagagagaatcaagatacctttttttttcttttttttttttttttttattatactctaagttttagggtacatgtgcacattgtgcaggttagttacatatgtatacatgtgccatgctggtgcgctgcacccactaatgtgtcatctagcattaggtatatctcccagtgctatccctcccccctcccccgaccccaccacagtccccagagtgtgatattccccttcctgtgtccatgtgatctcattgttcaattcccacctatgagtgagaatatgcggtgtttggttttttgttcttgcgatagtttactgagaatgatggtttccaatttcatccatgtccctacaaaggatatgaactcatcattttttatggctgcatagtattccatggtgtatatgtgccacattttcttaatccagtctatcattgttggacatttgggttggttccaagtctttgctattgtgaatagtgccgcaataaacatacgtgtgcatgtgtctttatagcagcatgatttatactcatttgggtatatacccagtaatgggatggctgggtcaaatggtatttctagttctagatccctgaggaatcgccacactgacttccacaatggttgaactagtttacagtccaaccaacagtgtaaaagtgttcctatttctccgcatcctctccagcacctgttgtttcctgactttttaatgattgccattctaactggtgtgagatgatatctcatagtggttttgatttgcatttctctgatggccagtgatgatgagcatttcttcatgtgttttttggctgcataaatgtcttcttttgagaagtgtctgttcatgtccttcgcgaaggacaagataccttaaagataagttttcgataaagaaaagccttcattttcctgggggaaatgaagcacttgatgccaaggacattagtagagggctagaaagattgcctgtgtgaaagacatatgctatatccaaataataaaacaaacgagatcctggggctcattcatgtgactttcaataaagtatgtagactgtctaatataa

SEQ ID NO: 1755 - DNA, 1007 bp, Homo sapiens
gagctttcctacttgcactcttctaccaaggccctgttagtgcactgattatagtactgacagataaacctagataaagagatagagagtgagtacatgcacactcatgtgcaaacccactcagagatgcatttggaacagtgctactgaaaggcagtagtcattttcaagactgaattccaaacatggtttattggtgagttaggaacatgtaaggccaagtacactgagagcctttttgaaagtaattgagtggaaacttgatgccattctaaatcaaggcatatccaggtggcccggttgaactcactccactgtacccagtctcaaaggccaggttgctaagaaaccaggagtaaaagagtcaagtgaccatcatttcacctgctgcttgcccccaatagtagtctctgtgaggccttactgacctcacctaggaagtgatttttgagcccttgtttcagggctgtggcctccctgctctatcctgaataaagcagacaggtgtgcagattttggccatgaaagcatggctaatagggccacagtccctttaaagaaacatggtttgactctggttttcttgggggaaaataccacaatcaccgatgcaaacattggaagattattgagagccctagaaagctgctgtgatcccagtagaaaatatgtcccagaaatgtcatgagattgctgtgtgttgcctgggacacagatcaagggcctatcttggagagctggggaccagcagtctgcctggaggccagggagcagtggctgagtagctctgcctttgctctggtctataccttaagaatgccaaagaatgaatttcaacgcctgcctttggcactctgacttaaagtgcaaaaagcttctgtggcgaggcatgctatcatggaatgagactggcttgccctaggcttaatggatgggcagtcattttgcagaggctatgggaagagggtgataatagaagagtggcagctataggaaattatcaacat

SEQ ID NO: 1756 - DNA, 883 bp, Homo sapiens
cctataagggatactttcgtttttcactagtggtgtcttagagagttgtttcatgcataatttattggatgagtatcatttgttccctaaaggatgctaggttatatttttgaattttgtcaacaaagcaatttttatgaagctgaagatcatatttttcacatttactttgacatatccgtgactcagattgcggaaacaggcctgaacccccagtgcttcttagctcagtaacagtggtgataattttgggtgcttgctctatgcctgatactgttccaagcactttccatgcctcagcctcacagcaaacccggagtaggttctattattagctccattttgcatcagaggagaaaactgccccaggtcaaatagctggtgtgtggggtggagctgggtttgagcccaggccatgtggctgctgcagaggcccgggctctaaccaggaaacagtaggtgctgggtagctctttatccaaatgtggagggaagggggttttccgagggccatggatttgtacaggctgccctttgtgctacacgaagtcctttaatcaatttactcttctcagaacccctgcgaggtaggtgtcaccacccccatgtcacgcagcacacagctgctcagtaaatagtggggctggagttcggaagtccacggtcatccctcagcatcaggggcccttggatcagggcaaggggcacaagaggctcacaagcacgagagactgaaggaaagcaagaactgcctttcctaaaactgatctaagacagcgcctgctgacaggaggtcacggctgtgttccgcttcccgcttcccctttcacctgctccctgttcccacttcacaagcaacagatgcatctctcacacctagcag

SEQ ID NO: 1757 - DNA, 1967 bp, Homo sapiens
ggaccccagcatgaagagttgtggaggtggaggtggggaagcagcctcacatctcacacttccttccttctcttaaatgtgagcagctgactccaagccttgtggaaactctagaaggtagaaccagccatctggggaagctggccttacagatgccccgtctggcatagtggaggttcctgtgctctgagaacgcagtgtgaatctagacatccactgcagcctgggaagagctgtgttttcttcaaaagtctttaactttcacagtcacccctctaaagaaatgttctctgattgaaggcatgcttctattcctactttattgtgtttcatgcattctgccagagtaattacttttcataccaattcttggatgcagagaaatctctggtagtctaaggggatttcgatccaagtaaagctactatctcctattccatccagacttttccgtctgcctccattctctcagtcacatacctagaagcaagccagaaagcctgtccaaccaaaatcactctccaaagcccaagcactttattgttctccctgtctgttatcgagccaaggtgtatttggcctcattttatgccattagttgtctggctttcatggctctgcaccacattacagtcagagcaggaaggccagcagtggagatagaattatggcagaaacccagagtagaggcctctgctggtgagggagcctgcagcactctccacgctggtgggtcctagcatgcccaacagacccccatcccttcccatcagccttgggccttgagtctcattccaactcatcccctcccctttcccttctttccagtcccaggtgacacttgatgcctctgactcctttgaagagggcatcaagaagtgaaagaacaaagtccttttctgttcgggatctgggcccatcctgggagaggtttttggcagaaatggctgcagtggaaccctctgactgccagggtgaaatagtgctccagcaggctgcggtagactcactgccagagtgggtcaggactggcccagaggacagggtcgtctcttgagagtcctcccagctccagggcctgattttaaagcagtaacacgaggatataggttatatacaggctcctggaaggcaggtgccgcagctcctgtgacaccccatatgcctgagcaagcttctccagcacaagagatgatgcaagtatgaatgggtacggggggagcttaaaacctgccaacactgagacttgatgccaggggccgtgcacccgctctgccacctgctaggtctgtgcaatggtcagagcagaggtgtgtgatgagttcagctcccaagcacatccacacttaggaagtgttctgtgtgtttttaaataatccttaccatgtaaagattgtattacatttgtatacaaaatttttttgcattttacttttgtaatatttggggttttatagatttttattttatggccaagtatacttttgtaaggaaatgttgaagtcttgagtatttttattcttttaaaaaactatagttagtgtcaactgtgagcactgataaatattattcatgtgtggttttccttctttttaatccagactttttaagaaactgttttggcatagagctttacttaaaatgctgcttcattttacacattgtgaatactgaagattctaaaaaataaagatgcatttaaaatctctgtgctgttccattgtagaaatggtaatgtgcattgctttgccaaagtggtaattaaatgtttaatggtttagaactcctagttcacaacagggcttctcgtcatcacttgcagcgtgtgagcttccaaataagccgccatttctttggaaaacgcacgcacttaggcatggcgatctcctgttccgttaggaaatacggttatgttgacattatggttactgtgcttgtggttttgcaataaacatgtattgaaagca

SEQ ID NO: 1758 - DNA, 972 bp, Homo sapiens
aaaatgcaaagtgaaattgatcgagtcatgtaagattttgtgtccaaactccactgggctgtggataattttaccctcaaggtcctccacactgtagtatggacacccaggtgtgtcccatagaggacataacaaaaatgtatcttaactgggaaaaaaagattaacaaaaagaatgaagatgtgcctcagctgcatgaatatagaaggagaaagatccctctatgtcattccctgggtgatagcaggagaacattatcctaagtaggaaaaaaagacagtggaaacctggttgaaggagcttttttgcacatcaccctggggagccacaaaagagagacaggaacaaaagaacagctgcaaagggagtgaaagaaacccaaagaggcattggcacaggcctactgggaatatgatatggcaaagagagaaaatgaggtctgttttctagttagagaagattgatctattcaaaggactttaaattttgttgattcactttgggtgcatccatgtgaaggtttgagttttgaatcatcatgatttttagccagtaaaagtgttctgggttttagcttcacccacatggacctcaactcgctatttagaagtctactgcccttcaggtgggttgccaacagactctgcctttgctgtacctgggagaatggcttcctcatcaccacattctgcatccttccaagatggcagtgaagatcttcccagggcatctggcattagcagaatgcggctgatgaggaaatatgaccccagtttaggccgttttaccagaatattacacaaattacaaaataacttgatagctagaagagaggattttgaatgtttttactacaaagaaatgattaatgtttgaggtggtggatttgttaattaccctgatttgatccttgtacaatgtatatcaaacatctcattgtacaccagaaatatgtataattttgtgtcaatt

SEQ ID NO: 1759 - DNA, 386 bp, Homo sapiens
ctgttagttacttaatactgccttgaattatgagaaagcctctatgctaaggatgacaatttttgtttgtacccctaatcacaaatgtctttgtgttttacttaatacattgaaggcatccttgatgttaggacatgtatattaatcttgcatttcggaatggccgaatagtgttgccttgtatacatgcaacatgctgtgtttagccattcctgtacacttaccttatttctttttcttttttctattataaacaagctgcaatcaaacatatattgcacacttatatgagtatgactgtaggataaatttctggaattgatatttctgtgtcatgaatatatgcattgtaatatttagtagttattgctctctagaaatttatc

SEQ ID NO: 1760 - DNA, 568 bp, Homo sapiens
cctatcatggcctctggttaaggtgtcagtcttgcctccaaatttcctcctaaagcatggaattggccataaatttgcttagtgattttctgatttagtatcattagtttgatgactagttttattatgtgagtgtgataaaaggttacgcttagtatacaaagaccttcttataagtctagttaataaaactagggccatgtgttactacaacataggagttaactttgtctggaggctttttcaagcccaagaggttgtcatttctttatgtgtaagatactgcccacatactatactgaagtcaggaaccaagaaccggtcaatttacctcagccaagttgcttggactgctttgcttaataatgggtttgccatatctactttaatgagatgtgtggcatggtgatggttacaaaagtgatttgttaattattgcctggtaggaaggagaacatgttttttttgaacctatgcaaatagccacatgtctgtgaaaagtaaagggatacttttgtgtaatatttaaccatgtataccattgtttgtgtactttttaattgtgtca

SEQ ID NO: 1761 - DNA, 568 bp, Homo sapiens; identical to SEQ ID NO: 1760

SEQ ID NO: 1762 - DNA, 568 bp, Homo sapiens; identical to SEQ ID NO: 1760

SEQ ID NO: 1763 - DNA, 543 bp, Homo sapiens
gtgtttgggtatgatatatttgcctgtgatttctcattctcagagcattcccataaataatgccacaaagtagagtttgatttttttttttttgagacggagtttcgctcttgttgcccaagctggagtgcaatggcgcgatctcagctcactgcaacctccgcctcccaggttcaagcgattcttctgcctcagcctcccaagtagctgggattacaggcatgcgtcaccacacccggctgtttttttttttcgcatttttaatagaaacggggtttcaccgtgttagccaggctggtctcgaactcctgaccttaggtgaactgcccgcctcagcctcccaaagtgctgggattacaggtgtgagccaccgcgccctgcctagagtttgattctcttaaaccgttctactaaaatactatcagtttaaactaccatctacagaaataaaaaacataaaccactaaaagattaaagcatttaggagtttatatgcaaagaagtcttgcaagggagtacaagctttaggaggacaggcttatc

SEQ ID NO: 1764 - DNA, 901 bp, Homo sapiens
ggggctgaacgtagtggctcacgcctgtaatcccagcactttgggaggccaaggcgggtggatcacttgaggtcaggagttcgagaccagcctggccaacatggtgaaaccccgtctctactaaaaaaaaaaaaaaaattagctgggtgtggtggcatgcacctgtagtctcagctactcaggaggctgaggcaggagaatcgcttgaacccaggaggcagagggtgcagtgagccgagatcatgccattgcactccagcctgagccacagagtgagtcttggtctcaaaaaaaaaaaaaaaccttgtgttggaaaccatctccaatgaagcagtgttaggagatagggcctaatggatataaattacagtgtctaagatggatactttactcttttcttttgagaagggagagagtatgttatgcactgagaacttttcagatttcttgcagaggtcataatgttccagacaagctggcagcaatcattcccatcccatcacagatccaggcttatttgtagaatggttacacaaaccaagcaaaaccttctgtaaagtttctaccctttgctctaaagttacataaaaacaatttccaagtttgttcactgtgtatattttgttctttttcatggtagatttgtctgttggagttagatatccctaaatagtgtgttcaaatgatgtttttttctgactgttcaatctccagcatatttctgagggagaaaggacattgactttggagaaagaaagctgtgtaattacaaatggactattacaaagaactatgccttcctttttgaggagaaaaaagatggtttttaaaaattaatacgcaggctgggcgtggtagctcacgcctgtaatccaagtcctttgggaggctgaggtgggag

SEQ ID NO: 1765 - DNA, 899 bp, Homo sapiens
ggggctgaacgtagtggctcacgcctataatcccagcactttgggaggcaaaggaaggtggatcacttgaggtcaggagtttgagaccagcctccaacatggtgaaaccccgtctctactaaaaaaaaaaaaaaaattagctgggtgtggtggcatgcacctgtagtctcagctactcatcaggctgaggcaggagaatcgcttgaacccaggagacagagggtgcagtgagccgagatcatgccattgcactccagcctgagccatagagtgagtcttggtctcaaaaaaaaaaaaaaaccttgtgttggaaaccatctccaatgaagcagtgttaggagatagggcctaatggatataaattacagtgtctaagatggatactttactcttttcttttgagaagggagagagtatgttatgcactgagaacttttcagatttcttgcagaggtcataatgttccagacaagctggcagcaatcattcccatcccatcacagatccaggcttatttgtagaatggttacacaaaccaagcaaaaccttctgtaaagtttctaccctttgctctaaagttacataaaaacaatttccaagtttgttcactgtgtatattttgttctttttcatggtagatttgtctgttggagttagatatccctaaatagtgtgttcaaatgatgtttttttctgactgttcaatctccagcatatttctgagggagaaaggacattgactttggagaaagaaagctgtgtaattacaaatggactattacaaagaactatgccttcctttttgaggagaaaaaagatggtttttaaaaattaatacgcaggctgggcgtggtagctcacgcctgtaatccaagtcctttgggaggctgaggtgggag

SEQ ID NO: 1766 - DNA, 543 bp, Homo sapiens; identical to SEQ ID NO: 1763

SEQ ID NO: 1767 - DNA, 543 bp, Homo sapiens; identical to SEQ ID NO: 1763

SEQ ID NO: 1768 - DNA, 1612 bp, Homo sapiens; identical to SEQ ID NO: 1320

SEQ ID NO: 1769 - DNA, 1613 bp, Homo sapiens; identical to SEQ ID NO: 1321

SEQ ID NO: 1770 - DNA, 1611 bp, Homo sapiens; identical to SEQ ID NO: 1322

SEQ ID NO: 1771 - DNA, 5381 bp, Homo sapiens; identical to SEQ ID NO: 1323

SEQ ID NO: 1772 - DNA, 444 bp, Homo sapiens
gcccactgtgcccatcaaaggacagccaacacttgtgcagatggagacttctgctacaactccttattgttaattaacccctttgcaggccataagcatgttcacttgaaagagtgtagcattagctcctgctgggcagagttgtgatggggttgagctgattgcacagcaggaacaggttataattctgataacctttttaaaaagcctttttattggggatcttaaataaaattgtaactcgctacacttgatctttcccatttttcttgtttttcgttttttttaaaacactgagtgcttttctttgtaaaaaaaaaaaaaattcaagaatgagagctgggaaatagaactactgcaaatggaaatgaagggttgggtttgttcaattttttgtttgtttgtttcaccactgaaacctgctacattgtcccttcattttcc

SEQ ID NO: 1773 - DNA, 379 bp, Homo sapiens
ttggcttctaaatagtatcctttattcaaagaaaccaaggatccttaggaaaatgtctgattccagggctgaaacaggtaatatacaagttgcacttggaacatcttcttatgccagaaaataaggaaatgctcaatgaacaatgggaatatgtcaaaaggacacaaaaaccagcttgaaagggtcaaacttgcagtggtttaagcatagaaaataatatgctatttcttatagtaaaataccagctcataaaaatagaaccaatgatggaaatagacactcatcatgtggaaacttacacaaaggcacttgattcagtcaatggatgctaagaccagagttggaagtttgataaggaacaggatattgactaatttca

SEQ ID NO: 1774 - DNA, 556 bp, Homo sapiens
ggacaggcatgagccactgtacctggatcgagatcctcctattttaagatgtgtggtggtactcttctggaagaaaatcctaaatataataatagagatttatacattagtaactcttattaagtaatttgtagcattacaaaagaattagtggttttataaaaggtttcaaattttctgtaaacattgaagtctcaatacatattaagttatttgatttggctgcgtattttccagaccatttctaaggcatactttgactctaaaattctcttttgtaagtgattagtcactgcatgttctcctcatattatttcctcatcctactttcctttaaaaaaaaaaaaagctttctctcttaaaatccatgttacgggattcaaagcttctgaaatccaccatgcccaactataatatacaatttaaaattcacattaaatttcattgggaatattctttataggctgtgatgaaattaaaatcttacatactcctccatttatcatctggaacaatatctctgtgaacaaggaacaaaagaacaaagaaatgatgg

SEQ ID NO: 1775 - DNA, 556 bp, Homo sapiens; identical to SEQ ID NO: 1774

SEQ ID NO: 1776 - DNA, 4186 bp, Homo sapiens
attatgctgagtgaaagaagccaagcaaaataaaatagtgttctcctactgagataaatttgtattctatttatataaaattttagaaaatgcaaactcatatttagtgacagaaagaccagtgattgcctgggagtgggagaaggaaaatatggcaataagtgaaagagagagattaaaagggtcatgagaaaacttttgaggtgctggatatacttattatcttgattgtggtgatggtttcaccatgtatacatgtcaaaacttgtcaaattgtacatgttaaatatatgcagtttattgtgtgtcagttataccacactaaaactattaaaaatatttctataacttgcaaaattaaaagatactcttaattatctccagttaaaaatcgttgaaattgtgttttgtggagactttggcccttttcttggattgctttccaatgaaaatttattctagacagattaaggtaaaaaaagcttgaaaaaagatgaaagtgactgggaaaggactcggaaagaaaaccgtcagtttctaggtaatcgtatatagctgaattgttaagattaaatgtgtaagcacttccaactctaagataaagaaattatcaaatcaattaacttaatgtgtagacttttaaaatctcagtgctaataagagaagacagattgatctgtctgtgtacagcagcactcagttaataaaaaaaaatgacagattcattatatacaagagtgagagatttctcagtataacccagttgtggttcatgccgtagtgatactcaaaaccatagtgatataacattttcttcccaaccattttggttatatttataataattattcgtgttggtgattctgcatttggcaaagtgcagatcttatagaaaggagcaggttggggaaaaaacggtaatgacattaaggtgaaaaaatatattagaaagcatctgcttccaaaatatattagcataattcctatctagacagtttgtgttttgtgtatgggtaatgaaataccattttttgttgttcaagaatctttgcagtttcaaatcatcttcagctgatcttctataagtcttaccatatccagaccatatctttggttaaagttttccatccagaccttattttggcataaaaagtaattttattttccatttgcattttgcctcatttcatttttccacatcttggcaaaatgcctggttgagattgttctatttataatatgccaagcgggtaaaacataaatatgttttcccactctgtactttgccatcagtgatctccatggagtgggagccaccactatcatgttctttttctttaagataatggtagattttaaatgtgggctgtgtaagcatatctctatctctatctctatctctatctatctatctatctatctatctatctatctatctatctgtctatccacacacgcatatatatatatttaaaccctttatttcaaaatcatagttggtggtacaaccagagctggtagtgggattaccatattataataaacaattcatacttcaggaactagggacagagcacatgctgccttgttttttttttttttctttcaagatcttctaaatgtatttagatatcaattaatcaccctttttgttccagtaagttaagagagacctactataatccaggaagtaaaaacacagaggagacttcttggacgcttagttgtcagactactgtggactttaagatggatagtagtcagatagatacattgatagattttaaatttgggctttctttgctgttactcatatatagttgtctattttgcaaacatttatcaagttgtagggcgaaattatctctactggagcagatgaaaacttgtttaaatggtgattggttaagatccaaaatgagtatgctttcaatttagaaatgtagaaaagatgcttaaagtctttaggtgtatctctgaacatacttaaaatacttttaaaagtcattttttattccttttttttgagacagggtctcattctgttgcccaggctggagtgcagtgggacgatctcagctcactgcagcctccacctcctgggctcaagtgatcctcccacctcagccttccaagtagctgacactacaagtggatatcaccatgctcagctaatttttaatttttattatttcagtagcttttgaggtacaagtggtttttggttacatggatgaattgtttactagtgaagtctgagattttagtacacccattacccaagtagtgtacattgtaaccaatatgttgttttttatcccttacccacctcccaggctcccacttctaagtctccaaagttcattgtaccactctgtatgcctttgcgtacccatagcttagttcccacttataactaagaacatatagtatttggtttgtcttttctgagttacttcacttagaataatgacctctagcttcacgcaagttgctgcaaaagtcattattctgttcttttttaatggctgagtggtattccatgtatgtatgtaccacattttctttatctactcattgattgatgggcacttatgttggttccatatctttgcagttgtggattgtgctgtgataaacatgtgtgtacaggtgtcttcctgatacaatgacttcttttcttttaggtagatacctagtagtgggactgctggatcgaatggtagatatacctttagttctttgagaaatcaccatactgttttccatagaggttgtactaatttacattcccaccagcggtgtataagcattcctttttcaccatatctacaccaacatctatttttcttgactttttaataatggccattcttgctggggtaaggtgatatcttatgagtttaatttgcatttccctgatgattactgatattgggcattttttcacatgtttgttgaccatttgtatatcttcttttgaggaatatctattcatgtcatttgcctattttttgataggattgtttttttcttgctgatttgtttgagttccttgtagattctggatattagtcctttgttggatgcatagtttgcagattttttctcccattctgtgggctgtttactctgatgattatttcttcggctgtgcagaagctttttagtttaattaggtcccatttatttatttatttttgtttttgttgcatttgcttttggggtcttagtcataaatcctttgcctagaccaatgtccagaagtgtttttcctaggttttcttctagaattcttacagattctggtcttagatttatgtctggatccatcttgggttgatttttgtgtaagtggagaggtagggatccagttttgttcttctacatctggtcatcttgttttccagcaccgtttattaaataagatgtccttttctcaatttatatttttgtgtgctttgccaaaggtcagttggttgcgtttagctttatttctgcattctctatcctgttccattggtaatttttatttttatttttttagagatggggtctcactatgttgcctaggctggcctcgaactcctggcctcaagtgattctcccaccttggcctcccgaaatgttgggacaggcatgagccactgtacctggatcgagatcctcctattttaagatgtgtggtggtactcttctggaagaaaatcctaaatataataatagagatttatacattagtaactcttattaagtaatttgtagcattacaaaagaattagtggttttataaaaggtttcaaattttctgtaaacattgaagtctcaatacatattaagttatttgatttggctgcgtattttccagaccatttctaaggcatactttgactctaaaattctcttttgtaagtgattagtcactgcatgttctcctcatattatttcctcatcctactttcctttaaaaaaaaaaaagctttctctcttaaaatccatgttacgggattcaaagcttctgaaatccaccatgcccaactataatatacaatttaaaattcacattaaatttcattgggaatattctttataggctgtgatgaaattaaaatcttacatactcctccatttatcatctggaacaatatctctgtgaacaaggaacaaaagaacaaagaaatgatgg

SEQ ID NO: 1777 - DNA, 4190 bp, Homo sapiens
attatgctgagtgaaagaagccaagcaaaataaaatagtgttctcctactgagataaatttgtattctatttatataaaattttagaaaatgcaaactcatatttagtgacagaaagaccagtgattgcctgggagtgggagaaggaaaatatggcaataagtgaaagagagagattaaaagggtcatgagaaaacttttgaggtgctggatatacttattatcttgattgtggtgatggtttcaccatgtatacatgtcaaaacttgtcaaattgtacatgttaaatatatgcagtttattgtgtgtcagttataccacactaaaactattaaaaatatttctataacttgcaaaattaaaagatactcttaattatctccagttaaaaatcgttgaaattgtgttttgtggagactttggcccttttcttggattgctttccaatgaaaatttattctagacagattaaggtaaaaaaagcttgaaaaaagatgaaagtgactgggaaaggactcggaaagaaaaccgtcagtttctaggtaatcgtatatagctgaattgttaagattaaatgtgtaagcacttcaaactctaagataaagaaattatcaaatcaattaacttaatgtgtagacttttaaaatctcagtgctaataagagaagacagattgatctgtctgtgtacagcagcactcagttaataaaaaaaaatgacagattcattatataaagagtgagagatttctcagtataacccagttgtggttcatgccgtagtgatactcaaaaccatagtgatataacattttcttcccaaccattttggttatatttataataattattcgtgttggtgattctgcatttggcaaagtgcagatcttatagaaaggagcaggttggggaaaaaacggtaatgacattaaggtgaaaaaatatattagaaagcatctgcttccaaaatatattagcataattcctatctagacagtttgtgttttgtgtatgggtaatgaaataccattttttgttgttcaagaatctttgcagtttcaaatcatcttcagctgatcttctataagtcttaccatatccagaccatatctttggttaaagttttccatccagaccttattttggcataaaaagtaattttattttccatttgcattttgcctcatttcatttttccacatcttggcaaaatgcctggttgagattgttctatttataatatgccaagcgggtaaaacataaatatgttttcccactctgtactttgccatcagtgatctccatggagtgggagccaccactatcatgttctttttctttaagataatggtagattttaaatgtgggctgtgtaagcatatctctatctctatctctatctatctatctatctatctatctatctatctatctatctatctatctgtctatccacacacgcatatatatatatttaaaccctttatttcaaaatcatagttggtggtacaaccagagctggtagtgggattaccatattataataaacaattcatacttcaggaactagggacagagcacatgctgccttgtttttttttttttttctttcaaaatcttctaaatgtatttagatatcaattaatcaccctttttgttccagtaagttaagagagacctactataatccaggaagttaaaaacacagaggagacttcttggacgcttagttgtcagactactgtggactttaagatggatagtagtcagatagatacattgatagattttaaatttgggctttctttgctgttactcatatatagttgtctattttgcaaacatttatcaagttgtagggcgaaattatctctactggagcagatgaaaacttgtttaaatggtgattggttaagatccaaaatgagtatgctttcaatttagaaatgtagaaaagatgcttaaagtctttaggtgtatctctgaacatacttaaaatacttttaaaagtcattttttattccttttttttgagacagggtctcattctgttgcccaggctggagtgcagtgggacgatctcagctcactgcagcctccacctcctgggctcaagtgatcctcccacctcagccttccaagtagctgacactacaagtggatatcaccatgctcagctaatttttaatttttattatttcagtagcttttgaggtacaagtggtttttggttacatggatgaattgtttactagtgaagtctgagattttagtacacccattacccaagtagtgtacattgtaaccaatatgttgttttttatcccttacccacctcccaggctcccacttctaagtctccaaagttcattgtaccactctgtatgcctttgcgtacccatagcttagttcccacttataactaagaacatatagtatttggtttgtcttttctgagttacttcacttagaataatgacctctagcttcacgcaagttgctgcaaaagtcattattctgttcttttttaatggctgagtggtattccatgtatgtatgtaccacattttctttatctactcattgattgatgggcacttatgttggttccatatctttgcagttgtggattgtgctgtgataaacatgtgtgtacaggtgtcttcctgatacaatgacttcttttcttttaggtagatacctagtagtgggactgctggatcgaatggtagatatacctttagttctttgagaaatcaccatactgttttccatagaggttgtactaatttacattcccaccagcggtgtataagcattcctttttcaccatatctacaccaacatctatttttcttgactttttaataatggccattcttgctggggtaaggtgatatcttatgagtttaatttgcatttccctgatgattactgatattgggcattttttcacatgtttgttgaccatttgtatatcttcttttgaggaatatctattcatgtcatttgcctattttttgataggattgtttttttcttgctgatttgtttgagttccttgtagattctggatattagtcctttgttggatgcatagtttgcagattttttctcccattctgtgggctgtttactctgatgattatttcttcggctgtgcagaagctttttagtttaattaggtcccatttatttatttatttttgtttttgttgcatttgcttttggggtcttagtcataaatcctttgcctagaccaatgtccagaagtgtttttcctaggttttcttctagaattcttacagattctggtcttagatttatgtctggatccatcttgggttgatttttgtgtaagtggagaggtagggatccagttttgttcttctacatctggtcatcttgttttccagcaccgtttattaaataagatgtccttttctcaatttatatttttgtgtgctttgccaaaggtcagttggttgcgtttagctttatttctgcattctctatcctgttccattggtaatttttatttttatttttttagagatggggtctcactatgttgcctaggctggcctcgaactcctggcctcaagtgattctcccaccttggcctcccgaaatgttgggacaggcatgagccactgtacctggatcgagatcctcctattttaagatgtgtggtggtactcttctggaagaaaatcctaaatataataatagagatttatacattagtaactcttattaagtaatttgtagcattacaaaagaattagtggttttataaaaggtttcaaattttctgtaaacattgaagtctcaatacatattaagttatttgatttggctgcgtattttccagaccatttctaaggcatactttgactctaaaattctcttttgtaagtgattagtcactgcatgttctcctcatattatttcctcatcctactttcctttaaaaaaaaaaaaagctttctctcttaaaatccatgttacgggattcaaagcttctgaaatccaccatgcccaactataatatacaatttaaaattcacattaaatttcattgggaatattctttataggctgtgatgaaattaaaatcttacatactcctccatttatcatctggaacaatatctctgtgaacaaggaacaaaagaacaaagaaatgatgg

SEQ ID NO: 1778 - DNA, 4185 bp, Homo sapiens
attatgctgagtgaaagaagccaagcaaaataaaatagtgttctcctactgagataaatttgtattctatttatataaaattttagaaaatgcaaactcatatttagtgacagaaagaccagtgattgcctgggagtgggagaaggaaaatatggcaataagtgaaagagagagattaaaagggtcatgagaaaacttttgaggtgctggatatacttattatcttgattgtggtgatggtttcaccatgtatacatgtcaaaacttgtcaaattgtacatgttaaatatatgcagtttattgtgtgtcagttataccacactaaaactattaaaaatatttctataacttgcaaaattaaaagatactcttaattatctccagttaaaaatcgttgaaattgtgttttgtggagactttggcccttttcttggattgctttccaatgaaaatttattctagacagattaaggtaaaaaaagcttgaaaaaagatgaaagtgactgggaaaggactcggaaagaaaaccgtcagtttctaggtaatcgtatatagctgaattgttaagattaaatgtgtaagcacttcaaactctaagataaagaaattatcaaatcaattaacttaatgtgtagacttttaaaatctcagtgctaataagagaagacagattgatctgtctgtgtacagcagcactcagttaataaaaaaaaatgacagattcattatataaagagtgagagatttctcagtataacccagttgtggttcatgccgtagtgatactcaaaaccatagtgatataacattttcttcccaaccattttggttatatttataataattattcgtgttggtgattctgcatttggcaaagtgcagatcttatagaaaggagcaggttggggaaaaaacggtaatgacattaaggtgaaaaaatatattagaaagcatctgcttccaaaatatattagcataattcctatctagacagtttgtgttttgtgtatgggtaatgaaataccattttttgttgttcaagaatctttgcagtttcaaatcatcttcagctgatcttctataagtcttaccatatccagaccatatctttggttaaagttttccatccagaccttattttggcataaaaagtaattttattttccatttgcattttgcctcatttcatttttccacatcttggcaaaatgcctggttgagattgttctatttataatatgccaagcgggtaaaacataaatatgttttcccactctgtactttgccatcagtgatctccatggagtgggagccaccactatcatgttctttttctttaagataatggtagattttaaatgtgggctgtgtaagcatatctctatctctatctctatctatctatctatctatctatctatctatctatctatctatctgtctatccacacacgcatatatatatatttaaaccctttatttcaaaatcatagttggtggtacaaccagagctggtagtgggattaccatattataataaacaattcatacttcaggaactagggacagagcacatgctgccttgttttttttttttttctttcaaaatcttctaaatgtatttagatatcaattaatcaccctttttgttccagtaagttaagagagacctactataatccaggaagttaaaaacacagaggagacttcttggacgcttagttgtcagactactgtggactttaagatggatagtagtcagatagatacattgatagattttaaatttgggctttctttgctgttactcatatatagttgtctattttgcaaacatttatcaagttgtagggcgaaattatctctactggagcagatgaaaacttgtttaaatggtgattggttaagatccaaaatgagtatgctttcaatttagaaatgtagaaaagatgcttaaagtctttaggtgtatctctgaacatacttaaaatacttttaaaagtcattttttattccttttttttgagacagggtctcattctgttgcccaggctggagtgcagtgggacgatctcagctcactgcagcctccacctcctgggctcaagtgatcctcccacctcagccttccaagtagctgacactacaagtggatatcaccatgctcagctaatttttaatttttattatttcagtagcttttgaggtacaagtggtttttggttacatggatgaattgtttactagtgaagtctgagattttagtacacccattacccaagtagtgtacattgtaaccaatatgttgttttttatcccttacccacctcccaggctcccacttctaagtctccaaagttcattgtaccactctgtatgcctttgcgtacccatagcttagttcccacttataactaagaacatatagtatttggtttgtcttttctgagttacttcacttagaataatgacctctagcttcacgcaagttgctgcaaaagtcattattctgttcttttttaatggctgagtggtattccatgtatgtatgtaccacattttctttatctactcattgattgatgggcacttatgttggttccatatctttgcagttgtggattgtgctgtgataaacatgtgtgtacaggtgtcttcctgatacaatgacttcttttcttttaggtagatacctagtagtgggactgctggatcgaatggtagatatacctttagttctttgagaaatcaccatactgttttccatagaggttgtactaatttacattcccaccagcggtgtataagcattcctttttcaccatatctacaccaacatctatttttcttgactttttaataatggccattcttgctggggtaaggtgatatcttatgagtttaatttgcatttccctgatgattactgatattgggcattttttcacatgtttgttgaccatttgtatatcttcttttgaggaatatctattcatgtcatttgcctattttttgataggattgtttttttcttgctgatttgtttgagttccttgtagattctggatattagtcctttgttggatgcatagtttgcagattttttctcccattctgtgggctgtttactctgatgattatttcttcggctgtgcagaagctttttagtttaattaggtcccatttatttatttatttttgtttttgttgcatttgcttttggggtcttagtcataaatcctttgcctagaccaatgtccagaagtgtttttcctaggttttcttctagaattcttacagattctggtcttagatttatgtctggatccatcttgggttgatttttgtgtaagtggagaggtagggatccagttttgttcttctacatctggtcatcttgttttccagcaccgtttattaaataagatgtccttttctcaatttatatttttgtgtgctttgccaaaggtcagttggttgcgtttagctttatttctgcattctctatcctgttccattggtaatttttatttttatttttttagagatggggtctcactatgttgcctaggctggcctcgaactcctggcctcaagtgattctcccaccttggcctcccgaaatgttgggacaggcatgagccactgtacctggatcgagatcctcctattttaagatgtgtggtggtactcttctggaagaaaatcctaaatataataatagagatttatacattagtaactcttattaagtaatttgtagcattacaaaagaattagtggttttataaaaggtttcaaattttctgtaaacattgaagtctcaatacatattaagttatttgatttggctgcgtattttccagaccatttctaaggcatactttgactctaaaattctcttttgtaagtgattagtcactgcatgttctcctcatattatttcctcatcctactttcctttaaaaaaaaaaaaagctttctctcttaaaatccatgttacgggattcaaagcttctgaaatccaccatgcccaactataatatacaatttaaaattcacattaaatttcattgggaatattctttataggctgtgatgaaattaaaatcttacatactcctccatttatcatctggaacaatatctctgtgaacaaggaacaaaagaacaaagaaatgatgg

SEQ ID NO: 1779 - DNA, 556 bp, Homo sapiens; identical to SEQ ID NO: 1774

SEQ ID NO: 1780 - DNA, 11182 bp, Homo sapiens
ctgttttcactctttattaagcattgtactggaagtcctggtcagtgcattcagggaaaaaaaatgtgtaaagagaatgctgccaatatttgtagacagtacatgcaaaaaatccaaaagaatctacatttactaaacatttgtcagggttgctagatacaaaggtcaatttacaaaattccattgtactggatagttattgtttttaacatcagtgaggaatcgtctaagtaaatcatatcattcatacttactccctaaagtgttttttttgtttcagtaaatagaaagcaagttctaaagtaattctgctagtagaatactaataagggatttgcctttcagaatgttttttcatctggatgttttggttttattttagaaaaacaaccaacaatgccaattttaaagaatgaaatcaaatgccttccacccctcccacctttaagcaaatccagcacagtcctccatacgtttaacagcacaattttgacacccgtaagcaacaacaattctggtttcctccggaatctcttgaattcttctacaggaaaggtatgtgtttgtttgttggtattccatgttttaaagttgaagacagaacaggaagagagtagagaagttggaactgaaagtagaaaggagactgaatcacatacttacctttgtgggttcagaaggctgagtcactggaggatgggttttatgggactatagttctgagctgggccactttctcctgttacctcacttctatgagttgtcaagtggggacaggggacgtacctttttgcctgggggtcctggcttggaatcttctggatatgtaatctatactcattatgggaatggagtttcttgatggtaagggaatgacatatttgagacttttgttctttctccaattcagacagaaaatggactcaagaatacaccaaaaatccttgatgacatctttgcctctttggtgcaaaataagacgacttctgatttatctaagaggcctcaaggactaaccatcaagcccagcattctgggctttgacactcctcactattggctttgtgataatcgcttgctgtgcttgcaagaccccaacaataagagcaactggaatgtgtttagggagtgctggaaacaagggcaggtaatgtaggcctcccatcctcctgccctattcagaacccccttctcagttcctttagcagacttctgacaaccccaccccaggctttccccctccttcacctcctgttttattctttattgtttcaggtgaatataatcaggtcaggatgtggccatgggtcttactttttaaagcagatggtcctaagctggacttttccagtcaggtttttgttgcttcctaccagtccctgttgggtttttgacgagggcatccaggcttggtgattcctatggtaaacttcagcagaggaagtgagggtgtgactacaggctgatgggatttgggagatcagacaaaatgtgctacaaaatcatgcacccctcttacctgaatgaaaagcctgtgctgaaggcagttctaggtgggctagggccgcgtggtgtcacatagtccccaggtgcctgcttcaaagggcagtgttgttggatcttaagtgccggttaatatctttaggagaatttctaggcctgcttctgtgctttcttgttttggttctgttttctggatctctggcttctctgtttggccagatagggtctttgctaaaggaacactctgctcttggacaagaatttgggagaattgccaaacagaaagatgtgagtgtttaaccaaaaataaatttccaaaatgtttttctccatccagtgtactaataggatttgctcatttaatcatatatagacaagaaacaaaatgatgggctgaatacagtttatcggcaggctttctttcttgcttgtcaatattttaatgttagactatttcacataaaggttagagcttctgggttgtcttagacggccaaaagatttggcaccctcacacagccagtagtagtgaggggtgtcacaggccatattcctgcttggcaataacaggctcaagtacggtggggtcagtcaccctgtttcactggtgactggtgtcactggacactccttccagcgcttgtcttcttcacagtccgtcttgctgtaagtaatgagatcttactaggagaggtgatcctttctcctagatgcttacccatgtagtttgagagcaagggtgtgtagcagatgaatggtgaaggttggaggtgctttgggagctcagagaactaagccgaaactgtcacatcaccatctgagacggagcaccagctccatggaaatataccaatagcagtgtgaagagggactgccttcgggagtggggacagagctggcagagttcagactaaagttttccttctcttcatttagccagtgatggtgtctggagtgcatcataaattgaactctgaactttggaaacctgaatccttcaggaaagagtttggtgagcaggaagtagacctagttaattgtaggaccaatgaaatcatcacaggagccacagtaggagacttctgggatggatttgaagatgttccaagtatgtatgaaagatcttttaagggggttggggatgtgaaaggaggggacacaggaatggcaggagtctgagacccatcagtggcagccgcagcattttccaggattttggagtttaaaattaacgtctctcctccccttccttgttacaatgtttatgcttttaaacactgaggcattattacctgttctgttggtctttgttgtccctggacagaacatcagatagggtcagtctctctctctgagcagaataagtaatttctgttgcatgctggcctcagaaaaatgggtttactaaacacctgtgacccttgatggttgacgtgcattgctgttggttagttgggatgctgctcacttcttctggaacactgtagaggaggagcagattggatcgatgacagctgttgaaataccacctacatgcagtgggcaaaagggagcggctgaatctcccaagaatgagtagcagcttaataagcttctaggaaagacaaggccctgacacagatccattagttggtgatctttattttgctgcaccttgctgcctcctgggtacaaatggatttttttacactgcagaaataaaatggtggatagttggtaggaggggaaaattaaggaaaagtaatatttgtatactaaatttatcaggttatgaaaattttgcagagacatattttatttgtattgttgaggcataaaatgctaatttgtcatttattttggtctgtttctgaattataaatagtaatagttcattctgtttacctttcagatcgtttgaaaaatgaaaaagaaccaatggtgttgaaacttaaggactggccaccaggagaagattttagagatatgatgccttccaggtatgattatgaaggtggggagagatgattctgtccttcacttggtaggataaattcttttttgaggtagtgagaaaacagttttcaagaaaataacaaaagttctgtaattatactgccactgatttttcatttctagtctgtagtcattggaggcatgtttatttttagatgagatgaagaagtgattggcttttaggcctggctgactaatggaacaccacagattttccatggtaggccctgctagagaagaggctcactttttcttacaaggctgatttggaggcagttgtggaatctgacctgtcagggtcaggacaatgtagtcacagcactgagttagacaagaagacatctactgggtagatctattttcctgactgagcttgaaactttgaaaagggtgtcacaactaatcaatgatatatctctaagaataactttttgtctagaatttattgctgagatcttttgtctgaacggttacagctgattttgacacattggtgtgttgtaggagagagagaagacatctttgtaactgctgtacttctcatcttaaatatttgatggctgtcagtctgcatgatcacagatggatttgttccttttggtgtagaaggaacaaaacaggttacacaataatgaattagaaaagcaatctaactttgcaaattcctggttctgttgttctaggtttgatgatctgatggccaacattccactgcccgagtacacaaggcgagatggcaaactgaatttggcctctaggctgccaaactactttgttcggccagatctgggccccaagatgtataatgcttatggtaaggaggagatggctaactttaaaatggaaataaaacaattcaaaatgtttggaaaattgattttgtgggagggagaggtggaaaacacccataatcctaatgcgtaatacagccacagctttcatttttacatatttcctttcgttccctggccacatgtttgtgtgtttcttttcatagttgcagttgtagggcatatgcaattttgtgtttttccctttactgtacctaattttacattgtaaaatctttacatgttacttaatagtctttagatgacttttaatggtgtgtgatacatcattgagagaatgtacttttattagtgatttcagtgttcggacatttaggtcaatctgctggcattctagctgtcttaacatctgctacaattaaatgcagtgttctgtgttgttgagtagaagttagttacttaggattcaaagtaccctttgagttggacttttattcttttgacatgactcaatactcactgtctaacaaggaggatgcctgggataaagattggtttctccatttaccagagctttctttcatcatcattataactgagatcttcgtcagttttacacatggcctttaattagggctggattcgagttggccattttgaaggaagtatgtattgttgaatgcagttctagttgtttgaatatttcagtgaattttatttactcatttttactatttggcccctacttttccagtcctcctggaaattacttatttcttcctgccataattacttccatgtcattttccatttctagccttagacctgtgggtgtctttctcaaaaaggacaaggtctgttgttgtcttcgctatgttctccaaagactgttgggggagggaagggaaggaggggcaaggactccagccccacaattctgttacggttgagtcagctcagggaaccactaggagtgtagttggggactgttgtgacaggggagtgtttttgtgtgcaagctcccagcagtctccatgcccaagatagttctgccagggtaggggtaccagagaaattgtgtgtgggtgagaagacccggtgggcacaaggcctcttgcctgttcctcacttctcaggtctctgttggtgagtcctccatgtgctgtgggtctgcagtgtgctctctcgaggtcctgtccctcgagcccctcagagactgattaaagcagctgcatggttgggatcttgggcaaacttaagtatataagagcatttttccaataaattgtatagtttatccatgctttatagaaatcctgaagctttaaaggtgggtatctgagaaattttcaaaagaattgcttgcgtggtttaactagcttggcagcgggtctttccccctagacactaatagatggcagtgttactctataaaagcttttcctatgacaaaatggttcccatccagaagcaagcattcagaaggatgaaaataatgatgtgttcattttcaaacaccttatatcttattgtaaacatcattaaagagtggtcttttcaaaggttgtgtgattgagctgtgactcttccatgagagtaagtgcaaaggctctttggagagatcatataatccagcctctcttcagttcctgcaacaccccccattttgcaaatgaggaccaggacttgcggacagtagaaggggcattgacttgttcaggatctccaaggggcagctagtggcaggtctgaaactagtacttagatctcctgatttccaagctagagcccatttccctactcttcccccactcttaactccccatcacccaacagcccctactgtttcagctttttttcccccttaaaagtccatggtgttttgtttcaggatgttttgttgtctagcactcctttccctttgaccattatgtttttacaattttggtttcatctcagtttaccatggtttagagtctggttttatcaatgtacagttacccatgactgggatccagtggactttgggccagtggctgggcagcagttatttccttgctcgttttgcactgtggcactggctggatcagcaggcagccagtcctgctgaggctttgcctcctagtctcctttccttacttttcttgccagctccatcctcttcctattgcccttagtctaaccaccatcttcaagtttgtgtttatcgtttgcttatatttacaattttaacatatatatttgtattcctgcacaatattctttcagtttttagcctgcttttgaacttcatataaatagaatcagattttttatattcatccatgctgtcatatatcatccatgtgttcatttcattcattttatttctattacattaattgcttttttctgaaattttgctttttactatggaactatttttcaaatacagtgaaaacttgagagtctggtagtgactccatataactcatcacccagttatataacagcttttaactttttgccataatcgtttcattgtcttctctctttatgttttttcatcatcctctcaactatcctatgatttcaccctaataccaaacgctttacctactcccaggactgatatttcagcaagctggaaagaaaggaaagtacaacagggctctgggggccctggtcccaagctggagtgaagaaatgtgccctctcaaaagtatagcccctctaaaaccaaagccccaggcaagccagagataaagccttcctccaaaacagtattatggggcgttttcagaggctggcaggttagaaaacagccgctgcttgctcactacaagctgtgcttctccctactgcccagtctaagaagcagagtcctggtgttacaatgggttgcccaaagtgactgcagggtaagcttcaggatgattgttgagcaaggtgagctttctcctgtgagcaaggaattagccacagactgaacactgtgggggacctgtctttctggctcactcctcacccctcctcttttacagttgagagaaccaaggaatgcgttgggcagtattccttcttatactcatgatagccatttgacgttccaggtttatgtgtgtgtgtgggtgggtgctttcccttggactccccatctcgagtggtccttgggctttgtctcttgccccagaactcctaggctgtggcaacaatcaaagcctgagctcacttgatctagcagatgtccttttggcaaatcccagcttcggaagcctgctttaaccacttccatttcctgctgtttttggcttctgagtattccttcttttcttgctagcacatcgattggttaaagaatttttttgcaataatttgatccagaatttttattctcagcagaagagtcaatcagggacctaccatcccccaggtaggtagtggaaagactgtggcagcctttgttgtcttttgtaaaacttaaggcactttgtttttgcaggattaatcactcctgaagatcggaaatatggaacaacaaatcttcacttagatgtatctgatgcagctaatgtcatggtctatgtgggaattcccaaaggacagtgtgagcaagaagaaggtagggtgctgagcataaaaggagggcttactctttgagccagggcttgtggtctgatatctgctttctcttcttgctctagaagtccttaagaccatccaagatggagattctgacgaactcacaataaagcgatttattgaaggaaaagagaagccaggagcactgtggcacatatatgctgcaaaggacacggagaagataagggaatttcttaaaaaggtgtgctgcttatggcatgtgtgaacagaggcataaggaatagcaatattatgttactacatgtggtgaactgactggcttggctaggggaattgtcacaacctgaaaagttaaatctgtacctgtcagattgaataggctgaaggtggttgctaaggaacaaggattctaaatgattagggttacacttctaaaaaaagcaggccttgtcttttatgtctgtgttttgtgttagagtgcatttagagatttttgttctctgctttcaagttagaagttagttcatctgatcatctcccagcatatatctgtttttattgccttgagaatctgagcacttcagacgttcatgtatccttggccctgagtgaccatgttctgagtgagttgctaagtttggttttgtccactgtcatgtagcaagtggtcctacttgttactagcaagggttgcagggatttggaagattctaggtttcccctgtagttggcaggtttttttttcagcaagggctatgtgtggaaattctaggcaactagaaagatgagtcgtgttcagttttaaaattgtttggcactgaggctgccggttgcaactcaggtgtctttggctgatattcttcagtcattcatgagtcttggatatgaacattcgtaacctgttagctggccccaagtatgtctttaacaagcatttgtttgaatcaaagtgtttctggctaaggatcatttggctcttccagaaaaccggcttggtcaccatattgttcttttgatattgtcactctgagtctctgctttaccagttactggatcaaggataaacaagtctaatctgcagctgtctttgggactgtttcgtaagtcagattaagtaaaggcaggtttctaataactttaaaacaagttcatttataaggatactgagcctacttatgtttaaaaatctagactaaaatattgtttaaatacagtatttacaaacttatgcagagcctgtcagtcatggtttatgggaactgacatcacattttcttcgtcattcttctgttggttcattcagctgaagtctttgatactactagtcgtcttctgccaatgggggcacttaagttgaagaaggcctgacatttatgaactgccaacactgtttagaggaaaaaaatggcttattgggccttagcatgttactgagttgcataatattttgaatgtattctaggtatcagaagagcaaggtcaagaaaacccagcagaccacgatcctattcatgatcaaagctggtatttagaccgatcattaagaaaacgtcttcatcaagagtatggagttcaaggctgggctattgtacagtttcttggggatgtggtgtttatcccggcaggagctccacatcaggcaagaatcattactttttctttaatctctttatgtcatgaacttttgggtttgttactgatatattacttggtgtttttcaggttcataacttatatagctgcatcaaagtggctgaagattttgtttctccagagcatgttaaacactgcttctggcttactcaggaattccgatatctgtcacagactcataccaatcacgaagataaattacaggtaaaaatagcaccaattcctagcattctttggctatggctatggcttcatggcccattcttcaccttataaagagagtcagtgaacttggccatatcgtacttagtacacagtgagtcgaggaacttgctttatatctagtactactatctacttaagtgagggaggaacaagaggaaatctcaccttggtttgatttgatattgtttagaatctataagggactgtccccacagagaaaggccttagtactgaaaatgaatagatgtgacttctgatcttggcccagctgcctgtcggggtcttgaacacagtgcttaaccttcagtgctgcagtgttctcatcactcttaggtagagcagaactgaatctctgagactcaaagaggtctgagggggtggtattttcaaaaggatttcagtaatgaattatgtaacataatttcatgtttggaaaataagggaaaaatgataaaagctgtaccttggaacttgcctctccctgtactcactgtgagtaggtctacgtggtatcaaaacctctaaaagggggaaaatgagttcttgaaatcatgggtttaaaatgtatgtgaaatactggtctgaaggagcccagggaccttttgcaatgttgacatttcatacgaatattgaattttaaattctgagagaaggtaataaaattagtaggaggaagcttattcttagtgacaggttttagatttaaatgtaaaatgcccatattttctcctactatttttaggtgaagaatgttatctaccatgcagtgaaagatgcagttgctatgctgaaagccagtgaatccagttttggcaaaccttaatctccctgcacattggaaatgaattacaggcagctgttcaaactcttcaggcaggattcctgtggactttgagattcatgttacctcatcttcttttttaaactgtacccaacttgtgagggtactctgtctaatgtatatttctagtgtttacagacagtaaatgtgtatatgtagtaactatttacagaacatgcatccttaaactgtgacttctcacctagtgcagaacttttaccaggctgtaaaagcaaaacctcgtatcagctctggaacaatacctgcagttattcttcagctgtttggacaacttagattgggtttataactattaggaatcactgcacagtttatttgggttgtgttttgtgtctgagtcccctccctcatcccttagggtccagaagagcaatggaggaagtgacagctaatgttgcagttcttattgtatggcataggactggcattatatagcagaaatcaactactgtacaatttcttggggttaaccatctttagttaaatggaattttaatttaaatgacgctttgctaattttaagtgttaagcattttgcattaaaatattcatataatattttggctcagtt

SEQ ID NO: 1781 - DNA, 930 bp, Homo sapiens
ctttgtgaaggatttctccaaactcctggccttctccagcagctttgtgacaccacttctctaccgctacatgaaccagagcttccccagcaagctccaacggctgatgaaaaagctgccctgcggggaccggcactgctccccggaccacatgggggtgcagcaggtgctggcgtaggcggcccagccctcctggggagacgtgactctggtggacgcagagcacttagttaccctggacgctccccacatccttccagaaggagacgagctgctggaagagaagcaggaggggtgtttttcttgaagtttcctttttcccacaaatgccactcttgggccaaggctgtggtccccgtggctggcatctggcttgagtctccccgaggcctgtgcgtctcccaaacacgcagctcaaggtccacatccgcaaaagcctcctcgccttcagcctcctcagcattcagtttgtcaatgaagtgatgaaagcttagagccagtatttatactttgtggttaaaatacttgattcccccttgtttgttttacaaaaacagatgtttcctagaaaaatgacaaatagtaaaatgaacaaaaccctacgaaagaatggcaacagccagggtggccgggccctgccagtgggcggcgtgtgctagcaaggcctgccgggtgtgccgcagtcaccacagggttctgagaacatttcacagaagtgcctgagacgcggagacatggctggtgttaaatggagctattcaatagcagtgacgcgctctcctcagccaccaaatgtccctgacaccctccccagcccccacagataacatcagctgaggtttttttcagtatgaacctgtcctaaatcaattcctcaaagtgtgcacaaaactaaagaatataaataaacaaaagaaaggtgtgttagga

SEQ ID NO: 1782 - DNA, 2651 bp, Homo sapiens
agtggccagggccacagcaccaagaggcttgggccacaaagtaaaggtgagagcctgtggtgcccgcagttgggagaggggacgtggggggctctgtgcagtacaggcaggagaggggacgtgggggactctgtgcagcacaggtgggagagaggacgcagggggttctgtacagtgccaccggtggacatctctaagtagggaatgaaggggtgccgagacagagcacactgaggggtcccggcccttggcaagctctgtggggtgaaggtggccggccgggtgtgccctcctgtcagtgactggaggcagcacacaaggcacacagtgagacagccctcccgctccgatcttctaatcacagaccctggacagatccgggggccctgggcgccccgtgaggccaggccaggctgctgactgacacccagtcacagtggcctgtgtttcctggggactcaagtggagtctggggggtgacgtccccaaactgggctgccactctgtgacagccaaagccacgcagcctcgcaggcagaagctggggtgtggaggaccacgatcctgaagaaccccgtcctctggaccctggcgcagaggaggggagaagccgcagagcccggacgcccccctcaccggcccccgccactgtgcttggagcaggtgcatcctgtctggagcttgtgctggcccggcgagtggagcccagagcccatcccccactaccaacatcccccagattgctgcctgcctggccgaggaggtgctggtcaagatgtgttagtgaggagctagacaagatgagcacgtgagaagcaggggccagggagcctggacccaggacctgggggtgctgtggcagcgctgtggcggcactgtggctgggcacacccagcagcggcctagctctgcatgcctgtcaccacctgaccctcactgcggctgctgggcggcattcaccaggattgcacaatgacccacacctcccgtcctgcccaccagcctctggatgggaattcccacatctacccacccgcccatctgccagctgcctgcatgcctagccacagggccgtgtctcctgctgtggggcgcacactgctattggcactggggacctcgggccctggcccctccgtgctctccacctcccgagcctcctcttcccgccctgctgtggccctgtgtgtggtgtgggtcttgcagtggcaggactccagtggcgggtgaggacccactcccgcagccggcctcctcactgctcttgcctccgggcatgggaacgatgccgtctgctcgtctgcctgagacgctttctactccactccgagagtaggaggtcagccggggccaaatgacatggtggacatcaggcttcccgagatagctgtaggtccctgaggaatgcctgtgctttggcggggtgggggggtgggggtggcgaaattcttactctaggatggctccagccgccaggttctcattcagtgacgtcaagactggctatgtccccatgtccccagagcctcctgtgggctgcgacccacaggtcaccctccctggagcccaggctctgcaaggactccaaggcaccgggtcctgagctgccgggagggagggagggaggctcagggctgaccgtccacattgcctgtccctcccggcgctggcaagatgcgaacaccacagacatctagtaaacttcgggaatcactgtgcggggcccgtccaacaaactgaggacgaccacccaggcctcgcagcagcccgtgaagagtgggctctgagaatgtggggcacaccaggctccctctctggtccccaaccccagccgctgaaataagtgcagccacagcagcccccggtcacgacccgagacggccatttttcaacgctcaacttcactttcacagaaatgcaccaaaggcagcctcgctctgtggtctgcagcgattactgcaccaggagaaggcacccctgtacctgcagcacttctgggccagggctttgggacgggacgcgagctgaccacctgttccttctttccgcagggtcgcggagctcgccggccgccatgtggagctgcagctggttcaacggcacagggctggtggaggagctgcctgcctgccaggacctgcagctggggctgtcactgttgtcgctgctgggcctggtggtgggcgtgccagtgggcctgtgctacaacgccctgctggtgctggccaacctacacagcaaggccagcatgaccatgccggacgtgtactttgtcaacatggcagtggcaggcctggtgctcagcgccctggcccctgtgcacctgctcggccccccgagctcccggtgggcgctgtggagtgtgggcggcgaagtccacgtggcactgcagatccccttcaatgtgtcctcactggtggccatgtactccaccgccctgctgagcctcgaccactacatcgagcgtgcactgccgcggacctacatggccagcgtgtacaacacgcggcacgtgtgcggcttcgtgtggggtggcgcgctgctgaccagcttctcctcgctgctcttctacatctgcagccatgtgtccacccgcgcgctagagtgcgccaagatgcagaacgcagaagctgccgacgccacgctggtgt

SEQ ID NO: 1783 - DNA, 245 bp, Homo sapiens
cttagtgaggcgggtctatagtcaggggcaattgttcctcgtcagcctggctggagaccttccacccattgggattttgtaaaacatctactttaaaatgtggccgtgagaaaagcccccattcctccccaccatctgttcgcctctccccgattttctaggattaaagtataggcctgcaatcccctacctccaattctaaagcccacaaagctctgaaaacaggaagatgttccccccaagtt

SEQ ID NO: 1784 - DNA, 872 bp, Homo sapiens
gctgtgtgtcttaaactgcattggagtttgtcactgctaataccctagtccaagccaccatcatccctcaatctcatatttcctctctgctatcactctcccctctctacacccacgatccagtctattcatggaagctactatgaaaaagatatactgcatcatttcctaggccttctcccttgctccctggctctagcaacactggggaccctcattgctgtctgaggctctctgctcttgccattgcccctgtctggaaagctctttatccagatgttacttaagcagttcctttttgtcattcgcttctctgctcaaatgtcacttcaaagagcctgcttctgaacagcctgctctgagaataaggggaagaagcagatggagatttctgggtttttttgtaataaatgctattaataaatacttatggtactatctgactaaactgcagatatttatcactttggtaaatgtttacatttaaaccaaatttaagaagaaaaatgtttaaaaaactacacccacatccattgtcactttttgtctatcacctgggcttcaaggctttatcattatctgaaattatctcatttatttatttgtttattcatttattgtctatgtccactcctgtagaatgtaatctccatggcagcagggactttgtataacaatctagttcattgccatatgcctagggactataacatagaagctgttcaattaattgttaatcaatgaataactgtaataagatacttgagaatggttgtctttttgttaggaaaagactaagtactataatcgcaatgtctacataattttaaaaatattcactcctgagtaataaattatttgtggttaagaga

SEQ ID NO: 1785 - DNA, 872 bp, Homo sapiens
gctgtgtgtcttaaactgcattggagtttgtcactgctaataccctagtccaagccaccatcatccctcaatctcatatttcctctctgctatcactctcccctctctacacccacgatccagtctattcatggaagctactatgaaaaagatatactgcatcatttcctaggccttctcccttgctccctggctctagcaacactggggaccctcattgctgtctgaggctctctgctcttgccattgcccctgtctggaaagctctttatccagatgttacttaagcagttcctttttgtcattcgcttctctgctcaaatgtcacttcaaagagcctgcttctgaacagcctgctctgagaataaggggaagaagcagatggagatttctgggtttttttgtaataaatgctgttaataaatacttatggtactatctgactaaactgcagatatttatcactttggtaaatgtttacatttaaaccaaatttaagaagaaaaatgtttaaaaaactacacccacatccattgtcactttttgtctatcacctgggcttcaaggctttatcattatctgaaattatctcatttatttatttgtttattcatttattgtctatgtccactcctgtagaatgtaatctccatggcagcagggactttgtataacaatctagttcattgccatatgcctagggactataacatagaagctgttcaattaattgttaatcaatgaataactgtaataagatacttgagaatggttgtctttttgttaggaaaagactaagtactataatcgcaatgtctacataattttaaaaatattcactcctgagtaataaattatttgtggttaagaga

SEQ ID NO: 1786 - DNA, 369 bp, Homo sapiens
tgagggtgctgaaagtcttttatattttggtctaggtggtggtttcataggtgtttacatatcaggttgcatacttaagatttgtgccctttatatgtcatacctctttttaaattttttttaatgggcaagcttgagaaatagacttggaaaagaaacagaaactaagagaggctaggtcgtcagaatgacagcaatcaaggccatacctggttatgacactgctgttgctgtcactgtcactaagcagcctcatgtactccccactggagttagttagaaaacatcctcattctccattactcctgattcacagtcccagacagaagcatgagattgtactccagcttccaggaggcagagaggaat

SEQ ID NO: 1787 - DNA, 369 bp, Homo sapiens; identical to SEQ ID NO: 1786

SEQ ID NO: 1788 - DNA, 375 bp, Homo sapiens
ccctggctatagttgagagactctttggagtcaggtgtggactaaatgttgtattctcttacgatgtttaatgtggttttttgtaagactaaagactccagaattctgttacagagttgtttgctgatttgtttcttttgtgtaagtgcccttttcatttctagatcatggttactctaacatcgttcctcaaatatatgcatttcatggagttaaatgaaatacagactttaggacaattaaacagactaatggaaaaacttggcaaagtttttttaagtgggtcctaaattattagctagaattcagaaatttgggttcggcttctttaattttaaaattaagaagagacatgggctggcctctttaacatac

SEQ ID NO: 1789 - DNA, 355 bp, Homo sapiens
cccctaccccctggcgaatgcaaaaggaagaaacagaattactttgaaagagaaattctaggtagaaagtatgagaaaagagcagaaaccaggaaagtgagagaagaagctagaagaaaggaaagaaaaatatcaaaggcggaataaatataaaagctggtaaattaacagattaagggaaaaaagtagcagtctccttgatacatgctgaaacaaaatgtgataaagttgacacccattcataatactcgtacttagcaaactaggatagatgaacttccttgacctgataaaaatatgtaccaaaaatctacagcaaatgtcattcttaacagtgaaatgttagaatcaagac

SEQ ID NO: 1790 - DNA, 410 bp, Homo sapiens
gattcaaacactactttatatatttaatgaatacacgtccaaataaagatctctcttcaaaaattttggaaaatgttaatgcattttgaatataatggaacaaagaagaagaatactagagaaaattcacaattatgatgtttatttaggaaaataaacttgaagaaggttttctattaaaaaaacataagaatcatatccaaattttagactctccatcttctttggtatgaaaatcaacattcataatagaaaatattttcttttgaaaggtttagttgttattgggtctataacggttttccatataaggaaaatacagtattaagttatctgtaatcatctcacttattgaacaaccaatgaatgcatgcaagtaaccaagcatatgtgtgcagagaccagcatca

SEQ ID NO: 1791 - DNA, 368 bp, Homo sapiens
tttttttttttcacttaaccacttaagtcactgcctgaggaagtttctttttaaggaaataaataccaggttcattagaagaaaaaaaaaaccacataattttaattcattttgttttaaagatgcgtattttaaaaagactactttaaaatgaactaatatgttacactggatcatgctgtggcgactaacgtattgtcaagccttaacctaatgaaaacaaaagaaaagcgagtttggcactcacttgcacttttcatctctgttagaaagtatgtctcagtttggatctgagatcaggtttgcttggtaacctcaaagaataattttccttttttttttctttcaaaatttccttttgatcattt

SEQ ID NO: 1792 - DNA, 368 bp, Homo sapiens
cccagatggaagagcatgtgatttcgcatgctgcagtgggactgcgcaggataaagtcttcaacataagagctaaggtggaggctctagagggcgtaatgacaatggccataaaataagaggtttgggctaaatccctgaggtcccaagtcctaaccctgcatgagccaggtgccacttctagccctcctgttcctcctccctgtcatttttgctgtaattcttttgttggccacctgcaagtaggtgtccttggcactcctgctgtctgccctgctgtggtgagtgtgagccgggttgctcgtgcccctctctgagcctcagcttctgctcctccttgggctaaatcctgccccctcatgcccaaac

SEQ ID NO: 1793 - DNA, 326 bp, Homo sapiens
gactctggctccaaaggagctccaggtactcttgcaaatggaaaggaaaccaacgggcctgcaacgtattaagctaggagagtggttggcagtgatggtggagaggtgggcagggtcccaatcgtggaggccccatggccatggaggggtctagatttcattccaagtccagtggggagcccctgaaggcttacggcaagggggtggggtgccatctgttccctgtggctgccatggaggaagtgggcacaaggaagggagagacaagtggaaaggctgcagtggaagctccaggtgacgcaggggtgaccagcgccactgctgcg

SEQ ID NO: 1794 - DNA, 138 bp, Homo sapiens
gggcatggtggctcacccctgtaatctcagcactttgggaggtcaaggcaggtggatcacttgaggtcaggagttcgagaccagcctggccaacatggtgaaacctcgtctctactaaaaatacaaaaattagctggg

SEQ ID NO: 1795 - DNA, 1055 bp, Homo sapiens
ccagacgtggtggctcatgcctgtaatcccagcactttgggaggccaaggcaagtggatcacttgaggtcaggcgtttgagaccagcctggccaacatggtgaaatctcaactctactaaaaatacaaaaagtagctgggcatggtggtgcacacctgtattcccagctactcgggaggctgaggcaagaaaattgcttgaacctgggaagtgggttcaagagacaagattgcaccactgcactccagcctgggcaactgagcgaggctccatctcaaaaaaagcagtttgaggccactaagtatggtactctccagggctttaacatattagtatccaaaggcagattataggagtgttcattaattctcctgtgtacctttggacaacttaaactccctgttcctccattgcctcatctttaaaattagaaactatactaaattgtttataaagggaatattctgagatcctatgttcctagtaaaaccctgagtcattaagaaaagttcaggccgggcgcggtgctcacacctataatcccagcacttcgggaggctgaagcgggtggatcacctgaggtcgggagtttgagaccagcctgaccaacatggagaaacccagtctctgctaaaaaatacaaaattagccaggcgtggtggcacatgcctataatcccagctacttgggacgctgaggcaggagaattgcttgaacccaggaggcagaggttgcggtgagctgagatcgtgccattgcactccagcctgggcaacaagaacaaaactccatttcgaaaaaaaaaaaaaaaaaagaaaagttcaaaagtatgtgcttattaacaaagcttaggaagtatgtaatcagtgttaggaagattttttttaaacaacttatattacctattggtacagatttagttatctaaaatatgaaactatttaacatctttaatagcaacagataattgaagctctcatgaattattatctcttatcaatgatacatggttaggttagtaataattgaaatgctaaccagtttccacatttttc

SEQ ID NO: 1796 - DNA, 1055 bp, Homo sapiens; identical to SEQ ID NO: 1795

SEQ ID NO: 1797 - DNA, 353 bp, Homo sapiens
ctgggcgtggtggcacgcacctgtagtcccagctactggggaggctgaggcaggagaatcacttgaacctgggaggcagaggttgcagtgagccaagattgccccactgcactccagcctggtgacagagcaagactctgcctcaaaaaaaaaaaaaaaattatttttgtattagctgtgtgtggtggtcatgcctatggtcccagctactcaggaggctgagatgggagaaacgcttaagcccaagaggtcaaggctgcagtaagtcatgatcgtaccacttcactatagcctgggcgaaagattgagtccctgtctcaaaaaaaaaaagaaaggaagaaaaagaaaagaaa

SEQ ID NO: 1798 - DNA, 353 bp, Homo sapiens; identical to SEQ ID NO: 1797

SEQ ID NO: 1799 - DNA, 518 bp, Homo sapiens
ctaatgccaaaagcctggtgattcaagacaaaactacaaaaaaaaaaacagcagaggacatcagggaaaacaaaatagcatttcaacatgtattttcaaaacctacacaaaagcagacttcatgaaagataaaattcgttgtttaaaataagtacttaattttgagactaagcattagctatttgtagtaagagtcctaaggttttgcagataaaaagtgtactctggccaggcacggtggctcacgcctgtaatcccagcactttgggaggccgaggcagatggatcacctgaggacaggagttcgagaccagcctggccaacatggtgaaacccgtctctactaaaaatacaaaaaattagccgggtgttgtggcaggcgcctgtaatcccagctacttgggaggctgaggcaggagaatcacttgaacccaggaggcagaggttgcagtgagccaagattacgccattgcactccagcctgggcaacaagagtgaaactccatctcaaaaaaaaa

SEQ ID NO: 1800 - DNA, 451 bp, Homo sapiens
tgccacctttatttactctctctttctacccccaaccccagttgctatgtttcagtccaatgcagttattgttttctgtgatgttcaaattgtctcatatttgggcagcaaggagccctttcagattggctcataagtcctttccacatgcctcagtagtgcttggtaactttcttgcttgtaggattaactttgtaaaattttgttcaggagttctgccctctgtgttcattaattaaattccacacactgccccccaccctcacctgggttttttgtttttgtttttgtttttgttttgagatgaggtcttcctgtgttgcccgggctggccttaagtgatcctgctcagcctctcaagtacgtgggactataggtgtgtgtgcacaactgtgttcagctaacgtttttttcttacagcgtccctacccagtttgggtataaagattat

SEQ ID NO: 1801 - DNA, 451 bp, Homo sapiens; identical to SEQ ID NO: 1800

SEQ ID NO: 1802 - DNA, 368 bp, Homo sapiens
cccagctacctatcaaccgtcttaatgtaacagaagcattttacacagttgatcttgtccctcctccttgattcactttcataattgtcttccaggaccccacaatttcctagttttcttcctgccttgctggttgctgcttctcagtcccctttactggttcctcttcattccaccgtctgtaaattagaatgcccttggctcagttgttgatcacattttatctatgcttatttccaaagtgcttcaatttattctcatggctttaaatatcatctatagtctgatgattcccaaatttttatctccaacccagacctctttaccaaactaaagattcttgtatcttaccctactctacatcttca

SEQ ID NO: 1803 - DNA, 368 bp, Homo sapiens
cccagctacctatcaaccgtcttaatgtaacagaagcattttacgcagttgatcttgtccctcctccttgattcactttcataattgtcttccaggaccccacaatttcctagttttcttcctgccttgctggttgctgcttctcagtcccctttactggttcctcttcattccaccgtctgtaaattagaatgcccttggctcagttgttgatcacattttatctatgcttatttccaaagtgcttcaatttattctcatggctttaaatatcatctgtagtctgatgattcccaaatttttatctccaacccagacctctttaccaaactaaagattcttgtatcttaccctactctacatcttca

SEQ ID NO: 1804 - DNA, 32200 bp, Homo sapiens
cttgttgtactttcgtatgtaaaggagatttcagaaaaaacggtaattattttctccccagatacaaaggcatgtgggggttcacttttagcattacacccagatcaggttgttcatcagtagcatacgctataatctgagcagaactttctgacctataaaataaggttggcagagattaccctttagacctgacatatttactttccggaaactctactcattgcctgcctttgttcctattgctgagccaaaaaagagtcttttttttcgacctctcttggtatattagtcaaaaggaatgaaggattcctcttgctgaaaggggaagaaactaagctgacactgtgcattagcagaaatgacagcaatgaacttgatcagcagcaacaacaggggtccctgtggtcagagggaattacagaaagggcatttcattattttctttggtccagacatatttgtttacttcctagtgggctggtgattctaagtagcttgattatggctttgaaatggattgttgtgaaatctcagttatcagtgcaaataatggtacatcaaaatctgtggctaataaaaagcagcagatgatctaaattttgttgtgcgtgtctttggaagaagcttatatattgcccagtggatgggtatccacacccagtctccctttgaagctgaggacggccccattcccagcttgtctttattatgagagtccaggggtcctgccagcacaagaataggggtggcttcaaggcataaagaaggaaagcatactgtaaaggattttcttttggatgctgtatatagaagaaattgtaattgattctctagtcctttacagtaagtaggcaagtggactatccttgtttgtatcctttttttttttttaaatggcaagaaataaaatgggggagaaaaaccctgggagccctggttttgaagtggtagctgctcttgagcgtttctctgagcaagcacttgcattaggaagccatcactatagtaacctgaagctctgggtgcccatgttgctaggcaatgaaatgctatagacttaagtgaacactcagacctactaaaatcaatagggttggcttctagccctattgcaggacatcagtttgctattattttatttattttttgaaaataaaagcagtggctcctgggggagtaaatagaatgctttttgaggaggaatgcaggaaagattgagaatgtgattggaagaaataaagaagcagtaaaacgaaaaaggagaagcctaataaacaactgagcaaagaaagaaaggaaacctttgttaataaaagagtatttgaagggaataaatgccaaagataggccaacctcatagagcacgtagaaaatggactttttccagaagaagaagcgagggttttggagatgactggaacatgtttatgccagtgtatgtagatactcattttatagaacattaaagtacaccttaaatccttaaacacagaataaactcataaaattaaggcaaaaggaacaaagaggtaagctcccttccccctttattttttcatactgaaaaggtggtttagcgacattgaatacaatttgttttatatcattcagtattatcccccaaatagcccccagatatccacgtgatacctttcacgtacatgcatgttttcacatagttgcagggatagtcacatgctactctgcattgccctgttttcatgggcattattccattttccctgcgtatgtctgtgtacttgccaccatcattgtgtttagtggttgtgtactattccatctgcttggtacactttaatttattaaggtgttctcctagtattttacttttctttcattcattgataaagcacatgtgtgttagaaattgtgctgggcactggagatccaagatcaacaaaaccagatttctgctcttagggagttcacaggcaagggctgtttggccagggaacgaaagtataaaatgagattcacattgctgatgcttttcttatacatataaaagagccttttctatggtctagtgaagtgattttctttttattttgttcaaaatatttttttattttgctattctgattttgatatttttattgttacagtggtcaatttttaaatatatttcagttttctccattttttttcagttgtttcaaagtttagcaatttgtaatttctccacagatctgatagatttttcttcactagttgatcttttatagttgctattttatttttggaatgttttctgattgtaagtttcctgaggcctttcccaccatgcagaactgtgagtcagttaaacctctttcctttataaattacccagtcttgggtatttcttcataggagtgtgagaagaaactaatatgtatggctaactagaattaatttgtatgatatatagaaatgtaatttaaattaatgtttctctcttttcccccactaggaaagagaatactgtgccaggcctagactggacatcatccagccactttctgagacttgtgaagagatctcttctgatgctttgacagtcagaggctttcaggagaatgaatgtagagattatcatttaggtaggagatatgaaagatctggctgatatgcttttttaatgtttttttctcccccttcctacttgcaataaatggaatttaaattaaggtgctgaaagaatcttaagagaatacctgcgtagactgtgtgtgctgaaaacaaggacatttggatgcagagatgttgcaaaacttgcataagctcctatagtaaaagggaaggctagagttcagaccaggacccgggggaggattgggccccttgttttttgttcttgtattttttctattgtcctaactatttaatgtgacacataatttaatgtcaagctgcatggctccatggttgtcatatcactcccattttatgtgtcaggaaagttcgctctggggtggcagagaagttgtctttcttgtttgtaactgagtgctcagagcctgaaagacttctggcacattttaggtgttcagtgaatatttgttgagtggacggagaaatacacttagtcactgctcataaatacagggagaaccattaatatttagtcataccagagacatctgtgtttggctgttatcatacccttgtaaaatatattaatgaaaatagaacagttcagctttgtaggaatgctgtactactttaaacacaattgacatttgttgagaatattttcagttctcattgtggccaaaggaaatgaagaaatattctatatatgtttaaactttcttatatgaagaccctaatccattgaaaaacataagagtatattctagacttggcaaaaagcaactgtgattcacaactgaaaagtgtccaatctaggtatttggctcagagcaaactctcctgcacacttagaaacccttcagaacaggttttataattgaattctgcaggaaaccctcagattggcattgtgcacaacatgctgaaatgatagattatgtccctagggcttgggcatctgtcatttatgccttaggtggccttgaccttgatgaggaggaaacatttatcgctgaccatggggtgtaattgttctgtaaaagtagaacaatgctgtaaatggccacaaataaaatttatatacagtagatgaattctaatatgcagtagacatagagaatttttaacactttttcagctgaagtcagagtgttgatgtattaaacgtagaattttaaactcaccttatttttttttcaagttttttagtatgtcattccctccctttctgtccttctccttccctctcttgctttttggtcaagtatttttacacttaaatatttttaaaagcactgaaatacgcttctgtcattctttaccctgtctcccacacttaccttccagcagagccaaacacacaacaaagatagacacattttctgttcgctcttgggttgggtaacctaaccaggtcctctgaaaccattgccaagttttctgctgttcagtcaccaagtcgttcctctcttttctcacctacagaatactctgaaggggaatcacttttttacatcgtgagtccgagagatgttgtagtggccaaggaacgagaccaagatgatcacattgactggctccttgaaaagaagaaatatgaagtacccttgattttacttctttgaaagtattgactcatctacagcatagagagagaagataaaatgtttttgtaataaatcttttatgtagtcaaagtagagtttcccaagccaaaaatatgtaggaagttaataactttctagtacccccttcagaaattagggaaccaaaagattgcaatggattgactggctttcctgttaagtgggggaggagttgggagtggagggaggaggtgagttagatctagactgttggaagtttcattttttgattttgttcaaagaaattagagatagtatttcagaagtgtctatttagatttaatgaaatcgtttattttatacttatcacatttttactcacttaggatggtttgaactatcagtttggatagaatgatgttgtccacttcattgaggtttggcttagattaatttgaatagataatgcccaatatcgcttaaaaaaaaagaaaaaaaccatttttcaactttaatagctacaaagttacgttcttagatgggcttatatactaatttaaaacaacatccacaacaaatagtctacgtatttgttgtactaagtttgtcaccatctgaaaggatttggaaaaaaattttttttttcatttataaactatttaaagtccaggtatcgatacctagttcataacccagtaattaccatgttactttaaatccagtagtttctcaaagaaataattgtatgttttaaatatttatgttaaagtagtatttgtaaactttccaaaataaaaacaaaatcagagatttttcaaagacttaattttagatatacataaacatgcgtatagttcacttttttattgaaacataagggaaaatgctcctttatcaatatgtcataaagatctagaagacagctgcctttttttgtatggagactaggagactttgttgtattttgatttgtgtctgaaatgtgattccattgtcctaatgaggaaatgaattcaaatggaagtgggagaagtcttcattttggttgactgcctttgagtttgaattcagtgaggttcattcaaccatagcattaacaattccaatgcttcaagcaaaagccatgggaaaatggagctttattcgtgtagtgcagaatgctaaaccataataactatagtgtttataacctcaatatctttctctcccaccttctcccattttccctccctccttttctgcttttttttttttttaaatcatccttatgtttggaataaaggaagcattgatggcagctgaaattagccaaaaaaatattaaaagacataagattctggtaagtgtgcaatttgttatttgaaacataattttatctttcaataagttatagtgagactgaaaataatttgaaaagaacaggtttttcctatcttttgagaatttattttaaactaattccctaacctatgagatcaaaatattttatcaaatcagtttctgcttgtaaacaagagacttgaacacctgctaggaggcagttttaggtaatttggaaactgtatctgtggaaaacactttaaatacagagctttctagttatgtgtatgaaagtttccctaaatcgtaggtaaaaatcacattatcacaaaatttatcaaaaaaagagaggtttcctaaaactgcattgctttggtgtttccataataacagactcaattgattttgttatggaaactaatctagagcatcaaatacatttttattacattttggactcaggaaaaatagaatgactgaaagcccctttccttgttaactgtgacagtgaatgtgcagatggagagcagaggaactcacatcctgcacatgtgaagggtccttggagaccatctagccgagttcccttttttacaggtgaaaactggaagctcagtcttttatgcctatttgggtttcagtacaaattctttctgcctacattttccctaccgtaaacttctctgtaaaactccacatgaaagcctgaattgtcaaagagtgcagaagcaaaataatttaggaataacaggagaatagaaaaccagagcatcttaaaaaaaaaaaaaatccagccaaaattgtggagaataagcaaggattctctagaaatggaagagaatgcattccggcccttagagtagttaacatatgtgaagaggcagagaggtgccacagcttggcctgcttggttatgtgggcagttgaaggcttttttttttttttttgagacggagtttcgctctcgttgcccaggctggagtgcaatggcacaatcttggttcaccgcaacctctgcctcctgggttcaagcgattctcctgcctcagcctcccgagtagctgggactacaggcatgcgccaccacacctggctaattttgtatttttagtagagacgggacttctccatgttggtcaggctggtcttgaactcccgacctcaggtgatcggcttgcctcggcctcccaaagtgctgctattatagacatgagccactgcacacagcagttgaggggtttactacataggtagcaaaggtcagatcctgaagtgccgttcgtaattaagagcttgcttctctcttggaacatctagaagtcaatttaagctttcagacatcagatttccctgttagaaagattctctgatggagatggggccagaggagggccagctgagatggagatcaatcaggaggcttcctaatccaggtggaaggtcatgagacttacacagaatcaataggattggagaggtgaagatagatggaagatacagtaaacttttaatctttgggatgtggtaactgactctgtgtggatgaaagaataagagtaaaaatctaggctgactcccaggctttgggcttgggcctctggtttggtgctgccatttactgattgatagagataccctgtggaaggagaagcaggattgggagaaatgatgaatcctattttaaacacattagttttaggaatctgtgggacatcgtagtggagcccaggaaagaaatttgggctgaaaagttgagtctcagtttctgcacaggacacattagggtcctattagcactactgactgtaacctgtttatactcttagcttgctttatgtaattatgcttgcttcttaagcatattcatatttaaatgtatttatattttcatacattttagagtgagtgtcatgaacagaggaccatgaatggaaccatcaggaatgctgtcattcaagggatgatgcatacatagtagatttggaacagccagagcaaggtcatttcatgggagctgagagaggagagaattccagggtaaagagaattaaatgcttgagtagtggaggtaagcaggtcagaagggtaagacgaggtcagctggtcagttgtacactggatttggtgatatgaaagtagtgaattttctgtatgtgtattatttattctgaacatgttgtagggagtgaaaagtgaataggagattataaagtacggttctgagtatagattatcaggttagctgtgaaggggaagagagtgaaggctgtagctgaggctgtagctggggctatggcatcctgggatgatggtagtttttgggtattttgtgtaagagaggcacttaaacatgcttatgctgagggaaaagaggtaaaatagagttgacataaaaggttgatataaaaggaagaggaggagtgcaggataagctccacagtggagaagcatggacgtgaggagaaaggttggaaggattgactctgaaaaggagacattctttctctgaaccttgatggaaagaacctgtgtagaattgttacgtgtgatctgtttccagaaaaataaggaagttagacactctttcttcacttctgttcctatagacttgaaatatgatttctcacatagtagttattaaagtaaaaatttaatatactaaaaatgatgggtattttgcttcactcttgaaatgggcatgtcctgtacattagtcctatacattagttatgaatagattatttttctcttagcatgatgtaatttcataccaaacatgcagagaagaaatgggctcctgccatttttttttttgccatccaagaaggtatttcttatgcacctttttgtacataaagtagaaatcaacacccaacgtttcttatatatatcaagcttaagcttctggtgaaaatacttttaggtgcaaatagtatatgagaagatgagtcatggggagatcaagcaagagctgtcctcccatgcctctggtgatgttggccaccccaaatcctttcagaacccaggtagaataagcgaataaacatgaatactctgaagccagtcacttccctgctttcagcccaatttcttctgtaaactgatgggtttgaatcacaggtttttctgagctcatatcaactttaatattccctatttcctttagtatgatagtcattatttcatttttcttataacttctcttcagacttggggtagaagaagtaggtagcttgcattctacagatgaaggcacaggaaacaattttatatacattaacagtgtggaattgttcgatcatgtttctaatatcgaatacctcctttatgaaaaaatgtcttaaagggggcagattaggagcctttaaaatactaacattatttactttttttaatgacctgacctgtgaattctaaaatgtatgaaaatataaatacatttaaatatgaatatgcttaagaagcaagtgtaattacataaagcaagctaagagtataaacaggttatagtcagtagagctaataggaccctaatgttatgccctgtgcagaaaccgagactcaacttttcagttgtttcagttaaattttgacatttcttcatttggctttctctaggatattggcttggcatatataaatcacctggtggagagaggagactatgacatagcagcacggtaatgatgacattttcacaattatttgttaatataaatagaattgagcattgctaacagtaaaaataagccattctttgcagttgacattttatttttgtacatctttctaacgagggtaatttttgaatattatttttaaattataatttttgaatattaatgattccaagcacagaatcagtttaatgtttattattttcccaactatttcatttttaccgaaggagaattttttttctcattattaatgagaaaggtatcaagaaccatgaaggatctcagactttacctatttacagtctaacaagttagcctgtcatttccctggttgctggcagaagacaagagactcccaggtcagagctaaaggactctgtgagcaatagtaccagccaaggtactgctacaacaatagtagtcaaatagagtgtcaacatttgccccgatccccaaaccccaattcccacaatgcaacagagggtgggcatggagatcctgcccatgcagtgggttgtgatacggaagaggacccctgagcttagggtatctgaatcttttctagtgaccaagaaccccatgtattagtccattctcacactgctaataaagatatactcgatactggataatttataaaggaaagaggtttagttgactcacagttcagcatggctgaggaggcctcagaaaacttacagtcatggcagaaggggaagcaaacgtgtcgttcttcacaaggcaggcaggaaggagaagaacaagagcccaatgaagggggaagctcctcataataccatcagagctcgtgagaactaactcactatcatgaaaacaggttgagggaaaccatccccatgattcaggtatctccatctggtcactcccatgatgtggggattaatgttaactacaattcaagatgagatttgggtggggacacggccaaaccctatcaccttgtctgccttttgtcctaaaggcgtcattttacctttattgtactgggcagtaagaaaccttccctttcctcaggagggagacactatttgtgtcgtctcatttctagagctgtttgctttataagcatccttggaagatagtccagaagaaagtgcctctgcttatgattcaaagagaattttcccaacctaaggatggcagttaaatagaagtgactagaccccaggatcctgggttgcagaggtctgtggtgggcagaacacataaatgttatgtagtggtgtgcaagtctgtgtgaggggttcccactggaactggcagtgcccgctgcatgactgcatggcagtcctggaagagtgccctcaagcctgcttctcgtctcctgaggttatttaagaaaatgtgtttctttgatgtgtaaagtaaggtttcattcatacataagcagtcctccaggttatatagtaggataggattctagttttctgaagtctgattttgtagtgcataatttaaagccatttagaaaggttctggcactttggggtatgacaagttttcttcaaggcaagaaaggtctcccgaaaccagcagtgctcctctgggtaaatgggaaacttagaacaggcagatagttgggaaagcccctagttatagtcttctgaagtgattcatctttatttataagcattttatattaacttttataagttgtgttaatttatgtatgcaaccaaatgagtaacagtaatatctttatgttcgttggtacttgagatagaaattcatcaaaactctgagaagagagatttctctaaacctctggggaaaatgtctacttattctgtctctgtttgttttttgtttttttaatatatactttctttctgcctgggatgtttttactgccagcaaatgccagaaaattcttgggaaaaatgcagcactctgggaatatgaagtttataaatttaaagaaattggacagcttaaggtaagcaaagccttatttttaactctcagtttctgcaagtagtatattaatattgcagtggaaacaaagataatagtactcagctcttttttaggacgtgattattatctcagatggaaagaaaaatcaaacttttagagacagtttcaaaatataagcctcgtgtaaaaaaaaatatataagattatatatttattacatatacaatgtgttcacttatctctttccaattctctctgtgtttagatgaagttttcatgctctttttaatgacttttgaaaataggtgtaatctcatccagtaggttataaagcataagactttttttagatttactgaataatattgtatttttcaagtaatattttacctgctgaaagacagatggaaaaaattgaccacctagctctaatgaataattttgatgtttctttttttaaatctttcaacttagtgcacaacatcctaatcaatcaataaagtattcctatatttgttttaaacatttaaaaatttttcagtatttgtggaccttttgaatgctctcttcaagttataaatatgctttaaaaattcccagttactcatcttgtcaaccgtgtgactcctcctgtctgccctgtaaatgttacacttctcattgggtttattggatggtttctggaggattttatccagtcgtgcctccctgtttactttaatggctgtgtaacttggaccttttttttgaatatcatgtgatggccgtttctccttgtatatactgctgatgatgataattcaagttaatataaatccattccttcccaaattcagtccttttccattgagtctgtgtttgtgatacacaatatacccattccccagagtgtattagctcaaagccactgttcttgattagaacatgttacacccctcctcattctgtttaatctccacttcttgtcatttttttcatgtcaataccaatcggggctcttctcttcccctgtggtaccattgccttaacttttgcctgagccatagcaaatgccttctgatagatctgtgggcagccctagcccagagttatctgcataaaaaataagtctggactctcacttccctaatacctgttgcttccctcctgcctatagaataaaatcagaattcctctcaagaccccacctccccttcctctccagcctcacctcccttcagtgacgccatctcgcatctctgggctcctctgacctccctgcacacagatgcatgttcatggctccacgcctttgctcatgctattccccctgccagatgtcctgcccctctcttattttttcctgagaaacccagggctttagtgggcatggttctcctctgctgctgcagcactgtgctgacccctctgttataacacttaccacacaatacagttattgtctgtttaattgtctgcatatctttcttctaggacttgtgagctccttggggatggtgaccttctctgtctgtccccagtaaaaagtgtggtgattggattgtagggcattatagggtcattgaacagtatttgtaaatttgacttttaacacagtactgaaaatatctgaagaacacaagatgtatttttcctaatttcaaaagatgattatgagttggtgaaggttggtaaactccagttgaaggaaggaaagatgaatagattacctgtactcctcgattacttaagaagtcgacttttttcatctctgtgactttctccctcctattatttagatttctattaactcatcaggaagaacagagagataaagattaacctaggcaatttttaaattcattcatacatgtatatacttttgaaaatatattataatttattgttagaaagtagttttcatttaaatcctgttcaaaacatttttttcagagtactgtattccctcacatttttaaagtaaaaatatactttatgttttctgcataattggaatgcagttttgttttttcatattttaatggacttttttttcccttttccttacctaggctattagtccttatttgccaagaggtgatccagttctgaaaccactcatctatgaaatgatcttacatgaatttttggagagtgattatgaggtatggtgttctgatgtggtcatatttacttgttctcgatgggaggtgttaggaaatctagaaaggaatacaatggagcaatgcctgtaaaggaaacagatttgtagtttgcatgtggcaggtgaaactgagctagagaaactccagtataactcatgtttatgtagacagtgaaaacacttagtccgtgtgcattttaaggaattccttaaagttaccttctttctagaactaaagaaaaagagctaagtgctattttgtagatttcataaatacaatagcagctgctattccatctttgatatcatcccagaagaaagagaattatgagtgttctgtgaaaatgatggagaagagtacaaacttcctttacaaatgctgaagtatgttataattttcctatttttaaagtaatgtaatttaagcatttaaaaaaatttattgtttttatgattctgttacagttattgcacatgattgaactcttattttttcatgaaacttttaaaaatcctttatcgtcaaagttaccctgttgatttcatatctggaacactttttattgagatggaaagaagcatgacttaaccttagagattgtagatgttttctcctgaatgttttaggatgtatgtctggtcagtactgttaaggaggttgtaaataatttgtttttattttcataagctcttataaatagttcatgttttaccttcccttattctcagcttaattatttaattttgaattaaattgtcacattatcagtcaaatagctgtgttccctaacaacacttttgatcacatattatgtggagagacattttgtgttgctaaacagagcactgaaggtcagattacaaaaaacaaactgtacttctctggaatattgacttgtcaatttttttctccctaaaaagacatgaagtaatattggaggtaaagatgcttcatgacttctttgtatggggtttctagtcatatgcctgtagctttgcctattaatttacgacccagcagagttaaacagttaagctttgtttaatattaacgacaaacatataagcatgttaaaaattggatgatttctgtggcatttcatttcatgagtactttctagacttttacttattatgataggtactgaggttttctataactttgctcattcaatcataacaggtcccttgttcctgtgtcctctaattagtaataatggccacagatagattttataaatatttcttgggtagcacatttattcaagggtacacaaagccagttgaacagagagaagcctaacatgaaatatgatagatgtttatttcagtttatggtggggtcatcatgcttttatcatacaagatgactggttattttgtctttattttgtgttcgaagttggcagtaccatgaggctgttgcatgatagggaaaagaaaaaatgaggccaaactttcttctttccctgagcattattattaatggtctaggggctactgtgagctgctggtattggggtagaaatctttacagactattttatcttatatagtcttaagaaaacagggctgtcacggtggctcacatctgtaatcccagcactttgagaggccaaggtgggaggattgcttgagcccaggagttcaaaaccagcctgggtaacatagtgagacctgtctataaaaaactaaaaattagctgagtgctgtgacatatgcctgtactctcagctattcaggaggctgaggtgggaggatcacttgaccctagaggctgaggctgcagtgagctgtgatcatgctactgcactccagcttaggtgacggagtgggaccctttctcacaaaaagaaagaaagaggctgtgtgtggtggctcacccctgtaatcccagcactttgggaggctgtgggaggctgaggcgggcggatcacaaggtcaggagatggagaccatcctggccaacatggttaaaccccgtctctactaaaaaaaaaaaaaatacaaaaattaaccaggcatggtggcatgcacctgtagtcccagctatttgggaggctgaagcgagagacttgcttgagcctaggaggcggaggttgcagtgagccaagatagcgccactgaactccagcctgggcgacagagcgaaacaccacctgaaaaaaaaaaaaaaaaaaaaaaaaaaaaaagagaggaagagagagagagaaaaacaaagaaagagggagagagagagaaagaaaaggaagggagggagggaagaaaggaaggacaaggaaggaaagacaaggaaagggaaacagagaaggaagaaaagaaagaaacttgatctgaaatattattttggttctacaaacattttaatgttctgattgaatccattcccaaatttctgaagtaaaatttcaatcatattaatatataagaagtttgtaatctaaatggaaaatatgtggtcttttgttctggtctcttgccatccttccaggggctactttggtagaaatcgggtggaactttaatgaaaactatattactgattcttttgcacttttcttaccaaatcctggtgcattacagaagcagcttctatcacattgttttcatttctaagtattatttaaacaaattcacagtagttcattaaagtattaatggagttatttaatagtaataatgtactattttttatataaaccaaaaagtgactgagacagatctcaatcgactttaaggtttattttgccaaggttagggacatacttggggaaaagaaacagggtctgtgtcctgtgctttttccaaagagattgttgaggacttcaaaatttaaaggggaaagagcaagcaggaggcaaaggagcaaattttaaaaataaataaataaataagtagggggagagtaagcaatgaggcacttggtcacattccagtgatgctctgattagctcaggaaatctacgttttacatgtaaaaagagagaagtggggaaaaagtcaattatgcattcatctcttgctcagtagatctagctttgacatgagctaaaggaagcatgtgaaatgacagctctctgtttgggaacaaaaggaaggcaatttttgcatgactcagttcccttaactttccctttggcttagtgaattggaggtcctgagaatttattttcctttcacatttaataacgtggatgtttttaattctctttactgtcttatgaacatgtttttgttctaaacattgtcaaggatcagtaagtaaactgctctgtcatactttgagttataaaacatgaagtctaaagtcgggaatcagggagtagagactgagcaagatactggcccagaatcagctgtgggacggaaacaggatcaaatcggggaaccacaaaatttgagatctagagatagccaggataagagccaggggataagacttgagccaaagtctcaaattccaacataaaactggcattagaagccaaagtggaaggaggaccaagatggtgacttgttaaagatatagaatgctggacagtttcactgtgggagcagccctgtcccaagcagactgccacggtcagttgtgctggctatacagtgcacaactgcataaccagttgcacccagcagcccaggcctaagtgcattagaggactcttggtggtggggaaagtagctgacttgggtaatatctgtaagctgttaaagctgtcatccaaatgttacagttagtccagaatggggatggggcaagtccaacctaaactcttgtccatgcactttatagaaggaacaagatagctttcttagttgtacatttcgtaaaactaaggacagaagtagatggcacgacctgcctcccaggaatgctaaatggagatttattgtacaataatattccctgcaactcttcaccacacccagacccatagtctgaaaattgatgaaatatttattgaacaaacttttaatcatataattgtttggtctgttatgtgactaaaagtgaatacttttagggatggtttaaattgtttggtttgttttgagaatttaggagaaaccaaactcagtttctcatgctatactctcacaacacaacacttctgtgaccaaatatctgggtttttccgctacacaccaagaaagcaattagttctgcagtggacaccagctggatgtcctctaattcagttcattctgacactgtctacatgaagatagcatcagttcctgcaggctgagggctcaggcccacaagactgcccccacttcagacataccaatcacaagttataggctgtcacctgtacttccgactggtcaactataaactggaattcccactaccacctccttagatttgactcatttgctagagcagctcatagaactcaggggaacactttacttacatttactggtttattataaagaatattgcaaaggatacagatgaacagccaaatggattagatgcagagggcaaggtatgtgggaagaggcatggagcttccaggtcctctttgggtgcaccaccctccaggaacctccaggtgttcagctcttggggagccctccaaagccactccttttgggttttaatgaaagcttcattacttagacatgattgatttaaacactgggccattggtgatcggtgtaaccttcagcccctctcccctccttggaggttgtggggcaggggtgggggtagggctgaaaagttccaaccctttaatcctgtctcagtctatcctgtgcccaaccccatccttaagttacctaggggctgctagccaccagtcagctcattagcatacaagaagacacatcattttagagattctaaggattttgagagttatatgccaggaaacagaaggaggaccaaatgtatatttcacaatatcacaactattattctgttgaatgagtgttctttttctgtttttcacctttggttagggttttgccacattgatccgagaatggcctggagatctgtataataattcagtcatagttcaagcagttcgggatcatttgaagaaagatagtcagaacaagactttacttaaaaccctggcagaattgtgagtatacttaagtgtttctttttccatatcagtctgtgttgaaaagtttttcatactttagatttggcaaactccaagtggagaagatgtattttataccattttcctacattccttcttagtaaaaacctctcataaacctcaaatgagtaggcgataaggacatgtgtgaaactgtacaattgcaatgtaatctgtttcccagagaagagaacccctaacgcacagcgcttgggagaggcagtggttaggaaacaaaagggtgccaagttttagatcactcaagcataacagtttcccaatgagcaaggctctggattctgctcttctagggtcttcaagtcagttaatttaatctctcaaatgtcaattccttatgggaaaattttaaactttaaaagagatgtcataatagaggactccctgaccctgagtcagggctcagaaaatggcagcttggttaatatttttcatatttcttgggcacattcagtgatgcaggctttgtgcgagacgcttatgatacagagatagataagatatgctctcaagtacttcgatctagggaaacaagaagtatactgcaggtctagccaagacgaccatccctgcatccacctctcctcagtgcccccatcacctcaggccactcctctcccttgttttttcttcttttgcccaaaaccaaaaaaggtataccaaaatgacctagaactctggacgtgttggattttccacaagaggaggttgtgtttatggcattctaagttgaaatgctaatcattttctcttggaaacgttgtcctgttagataccccttagagtctgcagcacgttcgtaatggaccaacagtacagcttcagttcagtgagctctcaagagctgacttagggacttaatgtgaaaaacattgtttcaatggaaaaacacatttcagttagacacagcccccttaaaatcagcttttggaatattagccatttgtcagctgaatactgcttgtaagaattggaacggatgtttctgttactaaaatgagaacttcatcctggatcctagtttctttgctgtatggatgtttgtaaaacttttgagactgagacccccaataaagaccatttttattacttgaatattgtgaattttcttaaattttggcaacatgagaggcaaagttctgagaaagaaatacttattggtcgtgtatagttaaatcctattcaaaaataggaatattttttgaaataaagttaacttttctctctaaaggagtgtttccatttttaatattgtgaaccatgatctctctgtgtgtgttttaattagaactgttgatgaatattaatgtaaaaaatttgtattaccaggtacacctatgacaagaactatggcaatgctctggaaatatacttaacattaagacataaagacgtttttcagttgatccacaagcataatcttttcagttctatcaaggataaaattgttttattaatggattttgattcagaggtaatgtgctttttattttagtactgtcaattatttttactattccaaatatttaatacttagatatctatccaaatgctggattggtgaatgaatcacataacttggctttatgccgacaatctttagaacactctgaccctcgctagatgttgttattctagttgtttggcattcaggaatccttttcataatgtagttattctgtgaaagcaattcaaagttgatagagaacttttaaagttgtgtgtgtgcgcatataaagtaatttcttgctaaaacaattcatataatttatagaaacaaaccacgtatatactttgactcatttatccctcctaacctgttttccagaattttaaaattaagtgaacttccatcttgaccgacttattactattttatttcttggtgttcacgtatccagcatgtggggtttcccctggtttgaggtgatgctcatgtccaggacatgtggaatgttattttattgtgtgacaaatttgaataacctaataataaatttacgccccctaatgagtggacccagccacagctcacattggtgcttgcaaagtgatgcaagctgtgtgtgtgtgtgtgtgtgtgtgtgtgtgtgtgtgtaaaagaaatctaattacaagtgctcatgacagaaataatgaggtttataaaacagtgttcttattcaaaaaattgaaattttagataaacctaaaagtagaaccctaaaggctccaaaaggattaatgcatttttcaattatattgtactgtatttagagatattgtgtgctatattaatctccaccaacttaaacttaatttagataggagctagagctacgtctttttctcaaagatgctttagccctttttaaaatactgagtcaagtctttagggactacagatttacgaagaattacgtagctccaaggaagttcaggtagagaggctctgcttgtctggcagaggatgagatgcttatgtaaaaattaattacattttcctcatatctagtctcccctcatgcacccccttccattgttctccagagctcgttttgcatatgttcctgtggaaaaaagatgaatgagctgaaactaattgctattctagaatgtgatccagatgtaaggaatcagagtcttctggttagaagagaccttagggataatctactccaacaccctcgtatttcagagaacaaaagtaacatttggagcagacagctaggtcgtagcagagtctagaacagggcccccaggtgttccgtgtgaggctcagtctggtgtgctgctttccctcttcctcttgacataaactgtctagtttgtgtttcctgaatgataaaagtggctaaagtaaattctgaaagtccaaaagctttatgtcattatgaaacttcaggtatctcattctctttctgactcttattcccttctcctcataaaaccagctccttctgtctgtggagtctcatagggagactaggtcgaggttgaagtagctggaagaaaagctcattttcttgatatactggtaaagagatgctctccataactactgagagtctcatgagaaggtgtgaaggtatccgagacatcggagggcggggggctaggatatgggcagtcaagatgttttgtatttgggaagttatagcaaagcaccattttagtagtgtgcaaaacacataggcttcagattgagatgcatttgaaaatgcagttcttcacaaatgtcattttccataagagccattgtaaagccaagggcctccttaagtatacaaaataagccttccacctgtgaactgtggtaggtacactgcattgtgtttagtcttctcttcttaaataacggatttcattgactgtggcttttcttatatgtttcagaaagctgttgacatgcttttggacaatgaagataaaatttcagtgagtgtcatttgtttttatatgtgttaccagatgaacgtctgggactcctatagctgtgaagaagagagtttatcagataattttgtagctgtctttctgtcctcatgactccaccttgaaacttttcttttttatctagattaaaaaggtagtggaagaattggaagacagaccagagctacagcatgtggtgagcatggcagtctcctccttttgcccttttgattgaccagtgggtgaatcacctttcagtattggtgcgaggaggatactggagtgaattcttcaaggaggttaatattccagttggaggtttcaccacaaacaatgttctgtaattaccaaaatgcagcatatgctgtgaattcaaggtcagggattaattgtagatcaggcagttgaattttgacccacaattgaattgtgatggaaaaaagttaccaatctatctattatattactataatataaatatatgtaacataactatatatttaactataatgaatgtttttgtgttatgttgtgtctaggaataagcactctccctctgtagttgccattaaatataaccatggcatatatcacagtaaaggccagtatggcaccgcagatactgtaccaagttctcctgctaaggaaatgtcagacaaccattccatatccagaccacagagcgataaaagggcagagtctcatttcttttgtccctcaccatgacaatagctaattccatatttcttgtgtgctattggtggttgtgtaattaaggcctgttattctagatttctttggggggctacttcaattctctgcattgcatcatcatgagagtaaagcaggaatagttgttttctatgtcctttaaaagttatacaagagaaaacttagcacacttagggattatatcagtaggactatgggtatcagatacaataagtgcacttgtatctttgcccatctcattgcaccctaggaggaggcttagggaatagagcatttttttcaaaagtcagttttctgctttgaagcttttgaagactgcaggaagggaatgagaggcacctttttttctcttttgctcagatgctactgctgcattgttcatgattggaaatctcaagattatctgcttcccaagcaaggctccacattgctaaccaccttaggaattcatttataaagcagtgatttctgacttacttaagccaggagacaggattatgggcagtagctctctgtgcgacaatgtaatcagtgcaatggtgaagtggtggcacagcccacactaacatggctcatcttccctgccaggcaatgtcttgtttctatatatataaatttgactcagcattcatgtgacagggcctccctgtcctttttgcactctgggaaacagcaccacatatccccgctaacacactgaccccagtgccagtggactggcggtggtgttcatcagacctctgcctggcacatgagttcagtctactgcttgtactgctccgttttgccttaggaagaagtgaacaggaagcctgaagattggtttcttaaggtgcatgtgtccatggttaggcgtcattgtgactagattcaacagcaataacaaacatcagcgcatttacagtctcagctgcagggcggctggtgctctatgtctgttataaaccaatccacttggaaacagcaacccaaggtgttaatgctcgtgggattggtgattaagtcttcctgtcttcagtagattgtggggtttttgtttacatttaatattaactaaacattgaattgttttttgacttctgagtactgtattgatagacttaatcttgcctgtgaggagaaagtgaattactgatttcctgtgaagttaactttttttcagacagctaaggtaaggaatcagttttgaaaactgtttcagaacacctgcattcttcttgatttttactttgtatttttgtttttgatgttaccagtttaggcagcatttcatttgaagagtcaacaaagaggagatgcagaatgtatggaaatgagtttagtgcccgctacttgagtttttaagaatatgtgcttgtcccaggactctaccctcttttgtgtaaaataatttttatgatctgggaagaccactcatctttttatttctgagccaaagcagataccaatgatgatattgacaactactgtcattaacatttctgtagttcttagtgtatgctaagttcattggttctgagtgatttcgtaatggcaactcgtttaattgtcacagtaactcaataaaatttttgtagataaactgagtctcagagagattagtgacttgcctaaggtcacagttggtacgtggcagagtcaggttttggggcccttctagagaaattatcggaatcctttgctctcccaaagggttttcctttccacttctccatcacctagaggttttccctgaagactgcttctcccccaacctgtccatgggaggtgtttagagctaaaaatagcaatgttagccaggtattgcttttctcattttaatgggtcacggcttatcttttgttccttttagtatttgcataagcttttcaagagagaccaccataaggggcagcgttaccatgaaaaacagatcagtctttatgctgaatatgatcgaccaaacttacttccctttctccgagacagtacccattgcccacttgaaaaggtaaggcacagactccccgacttgtacactttggatgaagaggttgtcattgatggtaagttgtttgtctttcttctctttctatctctgttcatctgtccctttccagggggaagactgttgctctcaaagaagtaggtttttggctgggacattctgtcaagaaaaggagatctcattggattagactttggtgaagagctgaagcatttctgtgacaggtttaattggaagaacagcttaatccagggtctaggacttaatcaaccatcaggcaaaaatgatatattagaagtctcagtccatctcccaggatcagagtgacacctcagagtcaagagcctgggagggagacacagactgtcctaagccagaagcagttgctccagtcaggaatcaggtttgataaactgaggtcatagcttaggtcctgcatcctatcttctttaagtgtctaccctatgtttttctttgtttctcctacatcctacattccactataattatctgcttactagtctctgtctcctggaaattcttcaaagacaaggaatttgtcttactcattttggtaaatctagtacccaccacacattagacatttactaaatgtgtgttgcatcatgagtgagagaatgaatgaataaattatatacatgcaagatcctagttcgggctaaataaggactagtaagttttatgagactgctgtttcaaaataaactgaagtacttaactatatatgtgctaacaactgggcagcctaaaagccaacagtattatgtcctacagttctcaataccatctaccactaacatctacaaatgtctgactaaatttggatggccagatacttttgaaagtcagctgtgtggaccaacaaaataaaaaacatatttgacccattagagatatgtgcaaagaagctggatgataacacagtttatgtacacttacaacttccgtgtatgcttccttagcccatgattattaaatgcattggagtactgtgaaccaatttagctcaatggatttttaaagtccacaattattgaaaaaaatcttgcctgcctgttaacttataaaacgacattagcattttatatttggggccctaagacattttctgaggacttaatttggaaattcattatcttactctaaaagtaaaaacagatactaccctcttctctcaacataggactttataacctggcaatagagtgagaatcttattctttgaacagtgctccttcatttgtttctcacttttcaagagaacattgtatatttcagagaggatgtggcagtctcctgaagtctcccattgacctctgagacagagaggtcacatgtgggtgattaacagcccttcccattccctaagcacaagatgcagaggcgccacccaggttccagtatctctatatctctcacacactttatgcccacctggtttaaagttttcgggtctagtagtactcagtggaagacaccctgcttcacccagtagggagcagcagaatgttgcagacctgcatgtgatgcttcctacacatatggcttgcttagagcatttgtgtagaccttgtagaatttttctctctggtccactggaaacaacatattgaatgtaaaagaactcagcacaagcatagtaaaaccaattatgttttagacacagttatttttaaaaatttatctcgtgtcccactgaaagagaattttgagcatggattagaggtggtaatggtgaaacagaccattataagataatcaagtagtaatccatatttttaggactccctaaatgggttttcatgtttcaggttactgagacttcttcataagagattatctgtttgtcaggacctattgtgggaaatctgtatatttgtagaaaacatagcactctaccctatcaggtacccaaagctgtcttaaaggagaggttcatgacagtattactaactcaagattctcactccgttttccttaaagtaagttctggttgggtgtggtagcccacacctctaatcccagcactttgggaagctgagggtgggaaaatagttttgggccaggagtttgagaccagcctggtgaacatagcaagactctgtctctacaaaaataaaaacattagtccagtgtagtggtacatgccagtcagtattcatagctactcaggaagctgagggaggaggaagtcttgagcccaagagtttgaggttacagtaagctatgattgcaccagtgcactccggcctaggcgagaaagcaaaactctctttaaataaataaaaaagaataataagaaagaattctgtatatactcagtcatcttagaaacaaatcccttttatgtttacatgtgacatgaaaagctatcgtatgtaccaatttgcgaatgacaaagtggatttctccaattaaacgcatcccaagcttgctagtaaagggcacggaatacctgtctgcctgttttgtataaagagcgactcatagaaaatgtgatctctttttctcctgaatatgaaattgagaactttgaaattataaagcctccctttccccaaagaaatttctgtctgcttccttagaatttagagattgttgagtcctattggtacaagaggattttttgttctttgtttctactttaaatgagaagtgtttaagctttcaaaggcatattcagaacccattgatccactgttgtttataatttacctctggcagaacactatatctttctaattttggttgtcttcctttactgggaagacactatatctttctaattttggttgtctttcctttggttgtcttcctttgccaacaattggctaattgttgagaggaggtgatttcagattggcaactgattgaaatcttcaagaatctaggttaaccttattttgaattgattgaaatcccacaatcaatagtatttggcccaaaactttggaaagatcctgacgtcacatcaaaagccctagttatagttatcaaaggccagagttcaggatttaaaatcaccacgactctgaaattcaaaaattaatcataaacttttatgaaattgtttgttctaaaggaaatacagagtttgtgggaatttataatatctacagcaatttttaaagataataaaaattatttgtatttcttttgtgctttataatgtatgttgtgccttcatgtatattgttttatttaatctctacaaaagtgcagttaggtggatagagtcgttttatacatgacaagccaagtcttagggagctggaaaaaagcctaaagtctagagctaataagttgagggaccaagacttagaacctggatgacttaattttaggctctgtattttttccactatgttggggaatcattttcaggtttaaaaagttaatggaaataagatatttcctagtattgcaagaatcatgaaagattattttttttaactgttaaactgtcctgtaatttacagatgtggtcatcaggcactggttttcattttgcaaatctgatttgcttgtgcctagagtggttaagagcagatcatcagttttatagttcagcagatttataccggaatttgtgatcgctctcatatctaatagtattcacaaggtggcagtatttctgaattcggaagaataaagctgagagatgccaagtttgcagattttcattaaagaaatttaaagagaagattggataaaagatgacgagatcaaggataggtagaaataattatttaatttacatttgataaggttcttattagttaccctcagttttctaacttcattctttaccttcatactaaatcagaaagaggagaattaaaatattatttttgcatcattttttactcaagttctattattattctgatttttcacttctattttcactgcattgtccgcgtgtgtgtgcgcgcacgcgcgcgcatgtgttgtgtgtgtctactttaaaaatcttagtttccctactgtttcctctagagggagcaccatggtccaggaacattcaagaatctaaatgctttctttttatactttactcaaaatttctagagatttctaaagtccattttctcatttgtgagaagaggataatttaagatactgttagaaactcatcatgaaacatctaaaattatgtgaaattgaaatttcagagactcaaattatctttgaacttggtgatactcatctgcttacattccgtgtcattcctaacttcagcttaccttcagacatttcttcccacatgacttcctttttgaaagtatatacaggatcttatagccttgctattctatggcatattctacagcaatggaaatgttttataatctactctgtcccacatagtagccaccaaccacatgtcacaattgagtatttgaaatctggctattgctaccaaggaactgaatttcaatttaatttaattttaatcaatttaaacttaaatagacacatagagcaagtggctgctgtcttggataactcaggtgaggcttcaaactgcaaactcttttgtggtttgagactagcatgttcttaagcattctcatgtgcagaagaaaatgggtaatggttctgtctgaaatcttgaatggtattttaaagtgtgtaagtgaatttccaagtacagaattgattcatggataccttttaataataaattattttaagcagcataaatgcttatcattagtcagactatctttctctaaacattctccttattcagttgtattacagtgttctatttatctgtgaatggcagtcccactcaactataaactatctgtatcttaacacccagaacaaatctaggcactcagttggcttctcagtggttttttgtttgaatcccgtgtcctctgatgtatttgcactattttgctttattatttaacttcttacttatgttttttgtctctgcagtagtatcactgcaggagagtgaagagttggtaagaaagtttcatcatttacaatggtgattgacaggcaagaccatataggaataggtaaaccatatttttaatcaaaataaaggaagattttctcggtattagctaggattagattcaactgtgagtgataaaaatcccaaaataattgtggcttaacagagcaacagtttctttttctgtcacgtggaagtgttggtggagtggccctgctgagagcaccatgccgcggggtcagagaccggggctccttcctcttgttcgtccaccttgggtgaccttgacctcatgacgtaaggtagtgccatccaatagtggagagtcagggtaagggaagcatttcaggcaaggggacgcaatggagaggtgagcagaggcaggtgaagctgcacagaaattaagggctaggttgtggatgccttgtaagtcgtggtagagattctcagctttaagtctgagtggagcgatgcaatagaaagttttgtaggcagggtatgagataaggtttcccaggtgcactcattcatcatactgcacccggttcagatgccacttccccttgaagcttctcacaagaggaccacacagtttcagtgtccctcctctgtacacatggccctttgttcatgttactctaatcgtggaataatgcgttgtcacatctctgtcacttcctggaccctgagctcccgggggtggactcatgctgctaatgctcctactaagcctcctccattattctcttctttgttttcctcttacctataatcatcactaacatttttattattgtcatctttgcatctctatctaacctgaccctctagcacccagcacagagaatatagtaaatgtatcctgattaatttagaattagtaagtaatttatcaatatatagtaggtcttttttttttttttaagactaatggaaatgctctcatctgcatagttgctcctttttggatccttcttgatcatcaaaagtgttttttccttctcacctttgacagatccttgagcagagttctctttcagcccctgtgatctggcagtacaaatattcctagtaaattcaatcattcattcgttcattcatgcagcatgaattcatatttcctgagcttatggtatgcacaatactaggaaaagttcaaccatgagcaacattccttacatcttaatggagggaaacagagcttaaacaaatgactacagatttggaaggaagcagtgctgtaaggaaacctgaagtagtgtaaagagagaaagcttagtgggaaaggccctttcttttcatttggtgtcttgttttctactcttgctcatgaaatgttctgagtagcttcaaatatgttttaaattgaattgtgtagagtccagtacctctgagaggtaactgagtgcagctattctagggagatgtgttctttatttgtttgctttgttttatttttaaagaagctgtggaaaaattctttcaagtgtaagtttaaatgactttattactgtttgttcttatttggtcgcctatagtaacatttttaccctgctttaattgaaggctcttgagatctgtcaacagagaaactttgtagaagagacagtttatcttctgagtaagtagcttttattcattttggtccccataaactaagaaatgggatgacaacatgaagtaaattgtgtaagaaaggacataggttttagaccaacgtaacacagaatatgagcctatttttacaataatttaatatatgaaacagacttcacagcacagtaaagaaggaagagttgtttcataaatgttgaaataacatattggcaatgtataatcaacatatcaaaatttatcagtttatacctcacaacatagattaagttgtagatgagttgacaagttttttcattttctaaaaaattataatcagcttatattaccatcatattggtagaaaataaataatcacttttagaaatcacaccctaaataactagaggaaatgcaattgaataccatagttttggagaaggaggagagctttttaatataatctaggtgtcagtgttcctggtcttctggctcctacctccacatgagtcacaatttttgtaccatgcataccaagaaacaaaacttgtcatcttttcacattcttccaaaatgagccacgtgcatgacaacaatgtgggttgtactgaggattgcataatgtagcatataacataacattcatatttggtgtttctccattgtcacttccctgctgacctcagtagggtttttccgctttacgcctttcccttatacagcactcactctcattggcctctttgcctctgttgaaaaataatccaaatcctctattcccttttatgtgtatgcagattcatgggtgctcagccacaaacccagaactgtccagttatagcacctgcccttcttaggagaagtgcttttggggctgcattttgttacttcagcatgttcctggggttctaatcacaattttaggtagctcatcaattcactaattccaaacagtgttctccccaagaaatattttggtggaataaatttttgtcatattgtcttagaagcagtagaggacttattagggacatatagtctgattttataaaaacttgataatcct

SEQ ID NO: 1805 - DNA, 2246 bp, Homo sapiens
gtaaaagaacttaaacattcaaacaaactggaaataacagacatcaaactggagacagcaagagctaagagtgagctagaaagagaaaggaataagattcaaagtgaactggatggtaatatgtgatttcccttgctgctgctgctgctgcttattttcagatatgaactcaaattattaaaatagttgaatctgaatttttatttccaaattttcaacttaatttagttttaattttggagtacatatgaaatgtttattatatgttgagtgttttgttcattgtaagatttaataactttaaaaaaatcagtcttatgtttttatcatagttattggatacataaatgaattttgtaaatgggatgccatacttcctgatttataaattttaaatctatttatggtgtagttattagtcccaggacattttaagtctggagaatgtgaggaagataattgggttccaggcttaatttttttcaattaaaaagatttttttatgtagacctcaggccagttcattgtagcctagtgcagagtaggcttatttatttattttttatttttattttttatttttgagatggagtctcgctctgtccccctggctggagtgcagtggcgtgatctcggctcactggaagctctgcctcccaggttcacgccattctcctgcctcagcctcccaaatagctgggactacaggcgcccaccaccaggctggctatttttttgtatttttaagtagagacagcgtttcaccgtgttagccaggatggtcttgatctcctgacctcgtgatctgcctgcctcggcctcccaaagtactgggattacaggcatgagccacgcccagccgagtaggcttatttttaagttccagtttaatcttggaacatctgtctcatcagatttcctcattatttatgttgtttctaacttgaagtatttaaataagcttacctttggcctgtagctatgcttgagttgatctgtagttgaactcatttcagacagagtttatgatgaatgcctttcatgttttgaaatggggtctcaccatgttgcccaggctagccttgaactcctgggctcaaatggtcctcctgcctaagcctcctcagtagctgggactacaggtgctaacaccgtgtctggctgctatgaatgattttttccaattgttaatttctatttattgactcatggatttccatagagttaagaagtaaatttttttaggaacttaaagaatgctgcattttgttttcactttgagttagatgtgaatttgctttagttattccatctgcaaagtatttgccatttcattgcaaagatttctgaattcattgtacaaacttgaaagtgtccatgttatttatacttctgctagagatctagcaattctgctagaatcaataggttttgaagggttttgtgatttatttcactctgctatcagccagctttttctatgaggcttaggtcacagaacctctttagaggtgaagtaagtaaacctctggttatcatccagtttgatctcaactctcaatgttcgaatgagtaaatgtatacagcttttattaaagtttttatatgtgtatgcactaaataaacagtgacaggaaaatttgctctgagttttagcctgtttcattcttattttaagagtgtttattaatgatgtgagtattgttgagaatatatatttgtagagactttctacattcatttgtcttaccagcttatgaatgcttgctgttaaatgtgatttttcatcttaataacattgaatatagtacacttttctccttgaaaaacactaggattacagtcagacaatgaaattctcaaagcagctgttgaacatcacaaagtgctcttagtagaaaaggatcgtgaattaatacgtaaagtacaagctgccaaagaagaaggttatcaaaaacttgtggtattacaagatgaaaagtaagtacttaattaccttagtttgacttaaatatccttgcaaatgaaaacattttgctgtcatatcatctttattatagttcttgtaacataattatgatctcttgttttaggttagaactcgagaacagattagcagatttggagaaatgaaagtggaacatgatgtctggaggcaatctgaaaaggatcagtatgaagagaaattgcgggcttcacagatggcagaagagatcaccaggaaggagcttcagagtgttaggtta

SEQ ID NO: 1806 - DNA, 466 bp, Homo sapiens
caggaaatcaggcattactattataaaatctattaactgtacttaaattttaccagttgtcccactgatgtctttcttctggtctaaaacccaattcaggatcacatgttgcatttagttacttttaatctggaacttatgaacactttgacaaatacttgtcagtattttgtatatcctctctcattttggttttgtattgcatttttcatggttaaattcaggttaggcatttttagcaaaacatcaaagtcatgtgtcctcagtgaatttccatgatttggccccttaactggtgattttaaccttgatcacttggttaaggtggtatctgccacatttttcccctataaaattactattttttccctttgtaatatataattatctgtggttgcccatatgatatttcaagtctgtgtaaatattctcatattttgcctttatataatcttccattaatttt

SEQ ID NO: 1807 - DNA, 1723 bp, Homo sapiens
aatcacatagagatattggttcaatatggacatctaaactataatgctaaaagccaataattagaataagttcattttaagaaaagcattaataatattagctaacgtttagtacctgtgccaaacattctacctatgttaccttgattttcatagccagcctaagaggtactattatgtatccccattttacaggttaagaaacaggctcagaggagtttaggatcttttccaagattacatagccagtaagtggtggcactaggaaccaaattcagactctgaatcgcatgctgtttatattatattgcactcattctaaatatgtgggaatcagaatgaaggggcttgtatgacttttggctcattttttgatgcatgtgacctgggattataaatgtgaaattaggtttacgaaaggatccagtgtcattgtgcatcatgggcaaggagtacctaatctctttaattcttccctggaagcttacgatgtccatccaagtgcacatagcaaaagttctgttgtaaagtttagcagagtgactttctttgactcagagtgatgacggaggaagctttgataagattttatctgaaatgttcatggacaagagctttcaaggagaacatccagagcaaggttctgaagacagctcatgaaggtgaagcagcagacctggcacaagaaatgaagagagagctcagtgtattaaagatgaaaacaagaaaaccgaatatattgaaaggagcagagaggcaatgaaaacaagacaactgaaatgaggtaacttgcagcaattgaaagggaatttcagtacttttatagaattcttaaaaattgtttcctgctgtttattttcaattttgaacagggttatttgtccatgccatactttttttgccaaattccaaaattgtgtatagttctatagttgtctggtggagtcaatggaactttagttaccagtctaagaatgtgtctttgagattgtccagttaattctctatttccagtagctgtaataaatggtgaaaaggtttctgactcctggagaaagtttctaactccttatgactaatattcataacagacttgtgagttccttgaacatggatacacctatatgcaagagtgtattccaaagctaactcagtgatctttccatttatctattcttggattagtggtgcctttgctctttccttctgtaaatgtgaatagttaagagttgactgcagaagtgtttacactttggcttccatgcctctggaatgtttgtgctttggtggtgagatgtgagactatatttgtatagtctgcatctctcaggctgccccagaatgttgtacagtgcagtgctgaagaaagcagcaggtacacacagaaatgcagcctttcctggttaaccctgcttggatctgagttacactttgtttcctgacttcttgggacttaggtaatcagtttgccttctactctatctcattttgtactcgcttacatactacattcttgtttgggctttcgtttcttcttgtaagcagagattttttaaaatccaatatgtgaaaatacggatgcactacaattaaataaataaaatgctgttgtgtttgttttgctttaaaattgtaaaggataaacaataagatagttttatctatgtggttttcccgatgcagttaaaataaaacctaatctgctaaaattgaatttacactc

SEQ ID NO: 1808 - DNA, 1723 bp, Homo sapiens; identical to SEQ ID NO: 1807

SEQ ID NO: 1809 - DNA, 9542 bp, Homo sapiens
tgagtcggatggtctgtccacaggtatgtgctgctgcaccatgtgatggggggcctggagggaatgcagggggcctggggctacgtccaggggggcatgggtgccctctctgatgcgatcgcaagctcagccaccacacatggagcaagcatcttcactgaaaaggtgaacggcccctctaccccaccccaattattagtaaggatcccaggacagaacaaagtctcagatttggaaggtcccttgttttaccaatgaacagaggggccatgaggggatgggttgcagaatcaagagattaaggtcatgcagtctgttagtggctaaccacccccttggaattccctggtcactgaactgagactgagtgtttcatggagaagctgaggcttcatggagaagctgcagaacttggtgggatgggtttgggatgaagaagttgtgaatgcctaggagcagcacagaccatggaaatcccggaagatctaacatggatttcccttcctgcggtttctggggccttgttctggtgggctctagacagtggcgaaggtgcaggtgaacagtgaaggctgtgttcaaggagttgtgctggaagatggcacagaggtgagaagcaaaatggtgctgtccaacacatcaccgcagatcaccttcctgaagctgacgccacaggtgaggctgtgggcaggagggtggagcttagatgtctgccaaaacaggggttagaaatcgtggggattgagggagccaggattgcatcagggtgtgagatgcaaaagccaagtctctgcatttgggaaacaggggggtaagggcaggtagcaaacggggaagaagcctcacaggtggggagaaggggccagagaggtgaagtgaccaagattccggccattggcagagccagagctagaacccaggtctgactttcaatctagagttatttccacaactttcctactttcctgatttctcccctctcaccgctctaattccattgtctttgtcaatgatctgttatattatccatgattattaattaatcaattaacaaagagccacaatacttctgggcatacaacaagaaatactggcacccagaactggagacttcagttgatcttggtggatttcagctgcttaaggcttgctcatgcgtctgcagttggctgtgggtcagcttgccggctgctgatcttggcgggactccttcatgtgcctgggagctggctggtggtggctggtccaggaccgtttctgctgggatgaccgggtgggggactcggctatgctccatgtgtctgtcctcctccagcacggtagtccaggcatgttctcaaggtctggcaaagggcaaaagcaggcaagctcaagcatgcatgcaagcatcacatggtttgatctctttgcatcctgtttgctagcattggccagaccaagtctcatggccaagcctagagtcagagtgtgagagcactgcaaggttacacggaagtgggtgtgcaaacagggaggggtgagctttgggggcagtttttgcaattgacttaccctgtgctcaaaagatatgataacatgtatacgcacatgaagctcctagccattcttgggggcaattcttaggggcaaagcactactttttctgagtgattccattactaaaattcaacaaacatcagtaaaaagaaacttgttaaggcaattctgagatcgtcgaggcttccaagagcttacagaccagtagtgaaaagaggcctgcaaaccactgacccctttgcaagcagggagaggtgcggactatttcacagtcagaactgctggccaagcgcggaggaggaagtggttagagctgagtgggaggggatctaggaaggcttcacaggggaggtggttttggctgagctttgaaggatgaagaggatttccggagggagcgactgagggatcttcctgagcaaagaaagaaggcagcttccttggggccttggacatctgaggcctttcatggagccttctccttccaggagtggcttcctgaggagttcctggagagaatctctcagctggacacccggtcgcctgtcaccaagatcaatggtaagaggcacaccacattgcagcactgtctcctttgacccatctgagtgagaaacctccaggctgggggcagctgaactcagtcatcatctccattcccggacctccagcctgtgtccccctgcagcctggtcagaaggtgaaacacttgctcatactttcctactcccgtccgccactgagggtagcagggtgctggctgtagagggaggaccttgtggggctaagacctgaccctcctctttggtccctcagtggccgtagacaggctgcccagcttcctggcggcccccaatgctcccaggggccagccgctgccccatcaccaatgctccatccacctgaactgtgaagacaccctcctccttcatcaggcctttgaagatgccatggatggcctgccttcccacaggtaggggccctggactttatgttccctgatgttcttccacatgggcctgggaggcggggctgtccatgccacccacagcagggatcaggcctggtgttcaaccttcacagtgacttaggatctgccaaaatccatactcctaaggacaggaagtgcatcccaggtgaaaaatctgaggatgagggcaggtaaggggtgaagagcggctcaggttagcagaaggggcagaggggcagagcactgcccaggaaagtgctggggctggggaagaagaggagaaaatgtgttctgggagagcaaaggaagttctctcattcagagcccgtcagagagcacgcactcaccgagtcccctgctccgtagcctttctttttctgataatctgccttcttgcaaaacttctaaaagcatttcccacctcccactgcagctgtatttccattcttctggaacaggcaggggcgctataggagcaagtgcctttccatcctgtccgctgtccagcacacactgttgaaaacctactcagtgctggactctgtactgggtatgggctgggagaattagcggggcaggggcatgaaactgacacaaagcttatgataggacaggtacacaaatatttatagcatgtggtaaagaagatgtgcgcctggaaagaagggtatagggcaaagttcattcatccatttataaatattctggggtctctattctgtgccaggcttggttcagtgagtgggcacagatcagcaagcaaagccaagaaagtctcaggtcgttgactctctatccatgagaggaagacaatcaacaagtaagcactgatgatgagcactgtggagaaaaataggcagggaaggggaggaaaggcttctctaataacgtggcacttgagcggagaccggaaggaagtgagaatacagatcttatgggtatctggggaaaaaacgtccagacagagggaaggtcaggtgcaaaggccctggggcaggagtgtgctgctgtataggaggcacagggacgaggccagagtggctggagagagagcacctgggaatgaagggtctcggatggtgctgggtcttgtcaagtgccctggctcttactccaggaaagtttgtgcagagcctgccttatgctttaaaaagaccaacctggacactgtatgcagaaaaagttaaggcatctgttgcaatgggttactgttgcagaatccaagggagagaggacagtggcttggacaagggtgggggcaggggaagtgatgagaagtgttggaagactgggtatgttttgaaggtgaagccaacaggactttctgttggatagggagtgggatgtgggtcaaaaaaaggagcgactgtgaaatgatgcctccatttactgaaaagaggaagaggcggtgggggtggagcagattttagaggctaatcaggcattggggtttgaacaggggatgtttgagatccctggtggacatccgagttcagcgagaacattgcagctgagggacgcagggagaaggggcatttcccgtggccttgaaggagactcatatttggagatcagagggagaacatgctccaggtagaaaaggtgtggcaggcaaaggtggtggggtgggaagcaggtcacagctctgctggggctcggggcagccctagcagctctgtcttccattggtctgctctggaaaagacagtcaggccactaaagcctggctgaaatctggctgcttgggcgcctgctgtcttaggcctggcccctttccacactcccactgtctgtgtggaccttcgagacatttgcgtttgggagctgtggttagagcacagcgtgtgatgaaggcaggcaaggacaggccatgcattcgggggtctggggtcaggcgagctcctcacaggtgctctggaccacgctagcagccgctaagcccgtgcaggtggacaaccactgtggctgtagagcgacaatcgcccagaattggtgtcatctcagggcctccactgtgtcccaagtcatctcggatgccctaccctccgcactgctgctctttagacctgccgtctcctccctgcccgcacaggcctgtgattgagctctgcatcccttcctcgctggaccccaccctggctccccctggctgccatgtagtctccctcttcactcagtacatgccctatacgctggctggaggcaaggcctgggacgagcaggagagagacgcttatgcagacagaggtaaagacagctgcacgttctgcctccagagccacagccgggcatgcgacccaactgggcctgctcctcctcactgccccattcaggattgacaactgcaggtgccattccaaagggaggaaatagtcaagggaacctcaagtcaacatagttgactgcaggggtcaggaactgggctaagaaagtcaagaagacacagttcctgccctccagttgctcacagtctagcaagggatggaggagactaattaagaaaccttttattacagcacagctgactgcacgaaccaaaggagacgcatgagccagagagacaaggaaggctttcaaaggaagggatggtcaagctgggtttccaaggatgactaggagctggccaggcagcaaagggcattccaagcaagagaaacagcttgatcaggccaggcgtgggggctcatgcctgtaattccagcacttcgggaggccgaggcaggcggatcacccgaggtcaggagttcaagaccagcctgaccaacatggtgaaaccccgtagctactaaaaacataaaaaaattagcagggtgtggtggcacatgcctgtaatcttagctgctcaggaggctgaggcaggagaatcgtttgaacccagaggcggaggttgcagtgagctgagattgcgccactgcactccagcctgggtgacagagtgagactccgtctcaaaaaaaaaaaaaaaaaaaaaaaaaacagcttgagaaaagtgaagaggtgaaaaaagctgcatatgcaaaaggagatcagcagcttcgtgtttaaggttggggtagggaagtggggaaaactggggactggactggcctacccatgcatctttgggatgaattaatcatttgcttgtggactgatttttgtttttcacctattgaggtataatttgcatatgataaaataagcccatttctgtgtgtaatttaatgactgttagtaaatttgccaagttgtacacccatagtgcctcctcttcttcctaacaccatctcatttctctgtttttggcaccccagtgtttgattgcatcgaggtctatgcccctggcttcaaggactctgtggttggcagagacatcctcacaccaccagatttggagagaatcttcgggcttcctggaggggtatgtataagcctagggggtctctcaccatagccttccctctgcaccctcacttcctggctatgacctctctgctttatcttgtccctccatactcagctttcatcaggaagggaggacagtggcagggaccccggctgagagagggcagagaagcggtcaaaccgagggaatgggggatccctagtgggggctcagaaacacaggcaggacagcccccactgagaaggtcaccaggattgtggccctctgccttgacaactatgctggctctgccatctgactttcttgagagagagcacccccttctcaaggcagcagcacatcctcagacttgtcaatttatcaaaaactagagattggagacagggagaccagataggaggccaggttcaatcgcctcattgcagctactgagcacttgaaagatcagagaccaccctaggcaacgtagtgagaccccatctctacaaaaacaaaaaccccgccaggtgtggtggtgcgtacctgtggttccagctacccaggaagctgaaacaggatgatcgcttgagcccaggagtttgagactgcagtgagctgtgatgcgtcattacacttcagcctgggcaacagaatgagaccctatctctagaaagaaaatttaaaaaaaaagcaaaagaaagatctgaggccaaagtgagatgtgctgcaagtgtagaatgcacacagtatagaaaaaaatgtaaaatatctcatcaataagttatatattgattacatgttgaaattataatattttggatatattgggctaaataaaatatattattgacattagtttcatcagcttgcccttccttccttccttccttccttccttccttccttcctccctcccttccttgtttcctccctccctccctccctctcttccttctagagataggtcctgttctatcacccaggctggagtgcagtagtgcaatcacggctcactgcagcctcgacctctggggctgaagccatccatcctcccacctcagcctcctgagtagctgggcctacaggcatgcaccaccacacctggctaatttttttttttttttgtagagatgagtctccctgtgttgtctaggctggtctcaaactctggggctcaagtgatcctcccaccttggcctcccaaagtgctgggattgcaggcatgggccaccacaaccggctctgcttttactttttaaatgtagctactaataaatcaaaaactacatatgtagctcccattacatgttcactgaacagcactggtccaggtatagaggaaagaaggccaggcagcgggaaggaagggaatggctgggtacagcaggcatggggcgggcagacttgagaagccttggtgacagtgtgcacataggagtcagggtggaggtgatgtgaagggtaggcacagaggccagggggaggaaggtggtgtcattcacttatgcaggaggatggggaggagcagactcgagggaagaggatggcctcagtttggggaaaggtgaagagggcagtgggggagcactcctgtgaggatgcccaacagacgtcaggcttcttgtccagacctgccccctgagtctgaccttcgcttgtcccatgctgcctcccttctcagcctggggctggtctcacccaagccaggggggcagaaccgtgctcgggctccgttgccccttgtctgccattcacagtgatcctgctggagcttggacaccggggtccgggctcaggtggatgccttggccagagaagggagttctcgcagagacgcatgccaacagccacaataagtcagacaattctgtttttccaacagagggagagggatgcagagtagagagcaaaaccctcttttccttcccgttcagttcgtgttccccaccctgctttcttcctcaaaaagcctctggaaaacttcactcccagccccagggcatgtgcccattccgtctcatctccttccctttctgcattttaaaacccaagaaaatatcctggaaggagaagaacatttgctgaagaacaggggaggggaagaaacccagccagagcaggaaaggctgtaactctcctgtgctgatgactgtggccctgcctctgcagaacatattccactgcgccatgtccctggaccagctctacttcgcccgccccgtgcccctgcattctggctaccgctgccctctccagggcctgtatctctgtggaagtggggctcatcctggtgagtgacctggagtcccactaccctgtggggactgggagggctcactggaggccagagacttggagaaggaggaagttaagcaatgaaggtggcagagagggaggggagcagggaactcccaacataagctgccctgtgttcagaattatccatgcacaggtgagcacacagccgctgcctccaccaggctgaccacagcccacagttgagctcacacctccccttcaggaggcctggggatgcatcctggtggaggcatctcaccacattccaatgtggggttgtgagagacccatgtccctaaattccccatccgtatatatatttagacagggcttcacgctatcgcctaggctggaggtgcagtggtatgatcacagctcactgcagcctcaacctcctgggctcaagtgatcctcctgcctcggcctctggagtaggtgggactacaggtgtgtgccaccatgcctggctaattttttattcttttgtggagatgggttttgttaggttgcccgggctggtctcgaactcccgcgctgaagtgatcctctccactcagcttcccaaagtgctgggattagaggcctccatccatattttagaccaggaaggatggataaagttaacttcttcaactttacaattctttcttgtgcgcattccaagcctaacggagctggctgaggctatttgctatgcacactttctctcagctgtgtagacttggtaccctggaaagagtctgggcttacacatcttccccctccccccagccccttattctgaaattttaacttcacttactaagcgtgtgcccatccagcacgtccaccctcagccgttgagactgtgggctgtggacctggcccctccccagacctttggtgcaggaagcctggagggagccagaatctattgagcggctgtcttaggtgattccagtgcccatgcccccggacccctctaaccagccccactctgctttgttgctggatctctgtaagccctgtccccacccccaccctggcaggtttttgagcggagctttggttcataggagattcccttccaggaggaggtgtgatgggagctgctgggcgaaatgcagcacatgtggcctttagggacctcaagagcatgtgaccctgaaccagctctgacccaggaagaagactccacccctgaattccaagtgctccattggatcagcttcccaggaagttcagcttcgggttagtacataaggccaccacaatgctcaagaaattattttagaaaaaacgtacgagttacatttagtgcaagttgaccttatgcccatgcctccatacatggactggttctgttttattaaaactaatatttcatacagatta

SEQ ID NO: 1810 - DNA, 279 bp, Homo sapiens
tcccgcaaacgcccattctcccttctctctcactgttccttcccctgggctctggtacacactcacacagacacctcaggatggacaggaagctgcctttttctttatgagtgagggtttgtgctgacagcccaatccgagaggtggcagtcagacacagcaaagcctgcagtgtggtctgacttaatgagcccccgcagaagcaggaatggaaggctgtgtgtgtgtgtgtgtgtgtgtgtgtgtgtgtgtgttgggatggagaatgcagccaagggt

SEQ ID NO: 1811 - DNA, 964 bp, Homo sapiens
gaaataatattgtttgtattaagttaactgtgttatccctactgcatccaaagctcactaatctctgaggttttaggagatttatctactctcctctaattggtagggttgactttcccaggacattgctaaggctagcccctgacggcaataatattttaaaaaaataaaaaataaaggattccacatagctccaaaagtcaggtaaaagctggagggaattagagatagcaaggaaagatcaaggattaacttgcaagctctgttttctctaatatctgcatctaggtaaattgtctactgccttgtctgctggatcactcattacttacacattttataaaaggttacccaaaaagaaattgttaacaaggaatgttaacaagcctttaaaagctaataaacaacagactgtggtgtttgctttcagttactcctggcaagcagaagtaagagtgtaggtcatcaacttcctaggtggctgtagggaacacctcctacagtaagcctatagggacaaaaactggtatgggaatcacaagtgtgagcaccattatcattaccttcctccacgtgctctcatttgtggaaaaattaatctaggcctcttgaaaatcctgtggaatctgccttttcatatccaggaaccctgggggctttttctgattgctgcttgatagtgctaacctattttttgtgtgtttcaatttttaagtgtttgtattttatgtcaacctcctcagtgaaggtcatacagttcacacagccatactatacagccatatatctgaaaactttcttggcttaattgtgcttccagaacattctaaatgaaaagggttaatgtcatttaaaaagtaaagcaatggaaattattagcatgctttgatttatagataatggctaagattgatgcctggtaaaatcctaatctccctgttttaatgaaaaaaaaaaaaaaaaa

SEQ ID NO: 1812 - DNA, 964 bp, Homo sapiens; identical to SEQ ID NO: 1811

SEQ ID NO: 1813 - DNA, 964 bp, Homo sapiens; identical to SEQ ID NO: 1811

SEQ ID NO: 1814 - DNA, 1144 bp, Homo sapiens
gaaataatattgtttgtattaaggtaactgtgttactcctactgcatccaaagctcactaatctctgaggttttaggagatttatctactctcctctaattggtagggttgactttcccaggacattgctaaggttagcccctgaaggcaataatatttaaaaaaataaaaaataaaggattccacatagctccaaaagtcaggtaaaagctggagggaattagagatagcaaggaaagatcaaggattaacttgcaagctctattttctctaatatctggatctaggaaaattgtctaccgccttgtctgctggatcactcatcacctacgcattttataaaaggctacccaaaaagaaattgttaacaaggaatgttaacaagcctttaaaagctaataaacaacagactgtggtgtttgctttcagttactcctggcaagcagaagtaagagcgtaggtcatcaacttcctaggtggctgtagggaacacctcctacagtaagcctatagggacaaaaactggtatgggaatcacaagtgtgagcaccattatcattaccttcctccacatgctctcatttgtggaaaaattaatctaggcctctcgaaaaccctatggaatctgccttttcatgtccaggaaccctgtgggctttttctgattgctgcttgatagtgctaacctattttttgtgtttttcaatttttaagtgtttgtattttatgtcaacctcctcagtgaaggtcatacagtataaacagccatactatacagccatatatctgaaaactttcttggcttaattgtgcttctagaacattctaaatgaaaagggttaatgtcatttaaaaagtaaagcaatggaaattattagcatgctttgatttatagataatggctaagattgatgcttggtaaaaccctaattttcctgttttaatgaaaaaaaaaaaaaaaaaaaaaaaaaaaagcttgtttcgtcaccatagaggcagctgccagagtctacacagcagaatttaaaactaaagatatagtaaaatcttacccaacaaataggatatttacaaagaagaaactaaaaaaaaaaaaaaaaaaaattcaagtgaggtttcacatttcaagaaaaagtcagcagca

SEQ ID NO: 1815 - DNA, 964 bp, Homo sapiens; identical to SEQ ID NO: 1811

SEQ ID NO: 1816 - DNA, 1143 bp, Homo sapiens
gaaataatattgtttgtattaaggtaactgtgttactcctactgcatccaaagctcactaatctctgaggttttaggagatttatctactctcctctaattggtagggttgactttcccaggacattgctaaggttagcccctgaaggcaataatatttaaaaaaataaaaaataaaggattccacatagctccaaaagtcaggtaaaagctggagggaattagagatagcaaggaaagatcaaggattaacttgcaagctctattttctctaatatctggatctaggaaaattgtctaccgccttgtctgctggatcactcatcacctacgcattttataaaaggctacccaaaaagaaattgttaacaaggaatgttaacaagcctttaaaagctaataaacaacagactgtggtgtttgctttcagttactcctggcaagcagaagtaagagcgtaggtcatcaacttcctaggtggctgtagggaacacctcctacagtaagcctatagggacaaaaactggtatgggaatcacaagtgtgagcaccattatcattaccttcctccacatgctctcatttgtggaaaaattaatctaggcctctcgaaaaccctatggaatctgccttttcatgtccaggaaccctgtgggctttttctgattgctgcttgatagtgctaacctattttttgtgtttttcaatttttaagtgtttgtattttatgtcaacctcctcagtgaaggtcatacagtataaacagccatactatacagccatatatctgaaaactttcttggcttaattgtgcttctagaacattctaaatgaaaagggttaatgtcatttaaaaagtaaagcaatggaaattattagcatgctttgatttatagataatggctaagattgatgcttggtaaaaccctaattttcctgttttaatgaaaaaaaaaaaaaaaaaaaaaaaaaaaagcttgtttcgtcaccatagaggcagctgccagagtctacacagcagaatttaaaactaaagatatagtaaaatcttacccaacaaataggatatttacaaagaagaaactaaaaaaaaaaaaaaaaaaattcaagtgaggtttcacatttcaagaaaaagtcagcagca

SEQ ID NO: 1817 - DNA, 1143 bp, Homo sapiens
gaaataatattgtttgtattaaggtaactgtgttactcctactgcatccaaagctcactaatctctgaggttttaggagatttatctactctcctctaattggtagggttgactttcccaggacattgctaaggttagcccctgaaggcaataatatttaaaaaaataaaaaataaaggattccacatagctccaaaagtcaggtaaaagctggagggaattagagatagcaaggaaagatcaaggattaacttgcaagctctattttctctaatatctggatctaggaaaattgtctaccgccttgtctgctggatcactcatcacctacgcattttataaaaggctacccaaaaagaaattgttaacaaggaatgttaacaagcctttaaaagctaataaacaacagactgtggtgtttgctttcagttactcctggcaagcagaagtaagagcgtaggtcatcaacttcctaggtggctgtagggaacacctcctacagtaagcctatagggacaaaaactggtatgggaatcacaagtgtgagcaccattatcattaccttcctccacatgctctcatttgtggaaaaattaatctaggcctctcgaaaaccctatggaatctgccttttcatgtccaggaaccctgtgggctttttctgattgctgcttgatagtgctaacctattttttgtgtttttcaatttttaagtgtttgtattttatgtcaacctcctcagtgaaggtcatacagtataaacagccatactatacagccatatatctgaaaactttcttggcttaattgtgcttctagaacattctaaatgaaaagggttaatgtcatttaaaaagtaaagcaatggaaattattagcatgctttgatttatagataatggctaagattgatgcttggtaaaaccctaattttcctgttttaatgaaaaaaaaaaaaaaaaaaaaaaaaaaagcttgtttcgtcaccatagaggcagctgccagagtctacacagcagaatttaaaactaaagatatagtaaaatcttacccaacaaataggatatttacaaagaagaaactaaaaaaaaaaaaaaaaaaaattcaagtgaggtttcacatttcaagaaaaagtcagcagca

SEQ ID NO: 1818 - DNA, 1145 bp, Homo sapiens
gaaataatattgtttgtattaaggtaactgtgttactcctactgcatccaaagctcactaatctctgaggttttaggagatttatctactctcctctaattggtagggttgactttcccaggacattgctaaggttagcccctgaaggcaataatatttaaaaaaataaaaaataaaggattccacatagctccaaaagtcaggtaaaagctggagggaattagagatagcaaggaaagatcaaggattaacttgcaagctctattttctctaatatctggatctaggaaaattgtctaccgccttgtctgctggatcactcatcacctacgcattttataaaaggctacccaaaaagaaattgttaacaaggaatgttaacaagcctttaaaagctaataaacaacagactgtggtgtttgctttcagttactcctggcaagcagaagtaagagcgtaggtcatcaacttcctaggtggctgtagggaacacctcctacagtaagcctatagggacaaaaactggtatgggaatcacaagtgtgagcaccattatcattaccttcctccacatgctctcatttgtggaaaaattaatctaggcctctcgaaaaccctatggaatctgccttttcatgtccaggaaccctgtgggctttttctgattgctgcttgatagtgctaacctattttttgtgtttttcaatttttaagtgtttgtattttatgtcaacctcctcagtgaaggtcatacagtataaacagccatactatacagccatatatctgaaaactttcttggcttaattgtgcttctagaacattctaaatgaaaagggttaatgtcatttaaaaagtaaagcaatggaaattattagcatgctttgatttatagataatggctaagattgatgcttggtaaaaccctaattttcctgttttaatgaaaaaaaaaaaaaaaaaaaaaaaaaaaaaagcttgtttcgtcaccatagaggcagctgccagagtctacacagcagaatttaaaactaaagatatagtaaaatcttacccaacaaataggatatttacaaagaagaaactaaaaaaaaaaaaaaaaaaattcaagtgaggtttcacatttcaagaaaaagtcagcagca

SEQ ID NO: 1819 - DNA, 372 bp, Homo sapiens
actcagaccatgattaggtttgcagtacctctgaaaatttgaagggtccttgctgcagccacactcacatcattggcttgttcatcaacagtcaatattctgagaacactgaagggaaagaagatggttctctgtagaccaccccagaatagctcaaattttttcctctggctcagctagtacacaagaacataatataaaatgttccttctgcttattccctcttcgggagaaaatgtaaatagaagttttttcccatcactgtggggtcaagccataactccaaaaggaaaatgagttaaaccagtttcagccttggtagcagacatgtgacttggtctcattcctttcccttgggcccagctttcctga

SEQ ID NO: 1820 - DNA, 314 bp, Homo sapiens
acctgcctcagcctcccaaactgctggtattacaggcgtgaaccactgcacctgacctaataaaatattcttacaatttaaaaaatgaaagcagaggaatggtggcggggaagctgacattttaagagttcacttccttgtagttatcacagttaattcttactgttagaataagtggtaacttgccaaggtcacattgctagatgtcagagcagaaattagaaatcaggtctagccaaggccatcacacttctcagagcattaacaattcagttcagttagtgtttattgaacacctattgtgttctggccct

SEQ ID NO: 1821 - DNA, 314 bp, Homo sapiens; identical to SEQ ID NO: 1820

SEQ ID NO: 1822 - DNA, 372 bp, Homo sapiens; identical to SEQ ID NO: 1819

SEQ ID NO: 1823 - DNA, 372 bp, Homo sapiens; identical to SEQ ID NO: 1819

SEQ ID NO: 1824 - DNA, 314 bp, Homo sapiens; identical to SEQ ID NO: 1820

SEQ ID NO: 1825 - DNA, 570 bp, Homo sapiens
actcagaccatgattaggtttgcagtacctctgaaaatttgaagggtccttgctgcagccacactcacatcattggcttgttcatcatcagtcaatattctgagaaaactgaagggaaagaagatggttctctgtagaccatcccagaatagctcaaattgtttcccctggctcagctagtacacaagaacataatataaaatgttccttctgcttagtccctcttcaggagaaaatgtaaatagaagttttttcccatcactgtggggtcaagccatgacttcaaaaggaacttgagttaaaccagtttcagccttggcagcagacatgtgacttggtctcattcctttcccttgggcccagctttcctgagccacaattttattttaaacttggtaggagtttggttttaattatgtgccttcctgaactcctgataactttcaagttaaaagtttttgtggggatttttctaagccagtctctggtgttttgagggccctacacatttcacaaatcaaaaccagtctggtttctgtccctttctaggattgccatctgaattaatgg

SEQ ID NO: 1826 - DNA, 314 bp, Homo sapiens
acctgcctcagcctcccaagctgctggtattacaggcgtgaaccactgcacctggcctaatacgatattcttacaatttaaaaaatgaaagcagaggaatggtggcagggaagctgacattttaagagttcacttccttgtagttatcacagttaattcttactgttagaataagtggtaacttgccaaggtcacattgctagatgtcagagcagaaattagaaatcaggtctagccaaggccatcacacttctcagagcattaacaattcaattcagttagtgtttattgaacacctattgtgttctggccct

SEQ ID NO: 1827 - DNA, 372 bp, Homo sapiens; identical to SEQ ID NO: 1819

SEQ ID NO: 1828 - DNA, 314 bp, Homo sapiens; identical to SEQ ID NO: 1820

SEQ ID NO: 1829 - DNA, 314 bp, Homo sapiens
acctgcctcagcctcccaagctgctggtattacaggcgtgaaccactgcacctggcctaatacaatattcttacaatttaaaaaatgaaagcagaggaatggtggcagggaagctgacattttaagagttcacttccttgtagttatcacagttaattcttactgttagaataagtggtaacttgccaaggtcacattgctagatgtcagagcagaaattagaaatcaggtctagccaaggccatcacacttctcagagcattaacaattcaattcagttagtgtttattgaacacctattgtgttctggccct

SEQ ID NO: 1830 - DNA, 570 bp, Homo sapiens
actcagaccatgattaggtttgcagtacctctgaaaatttgaagggtcgttgctgcagccacactcacatcattggcttgttcatcatcagtcaatattctgagaaaactgaagggaaagaagatggttctctgtagaccatcccagaatagctcaaattgtttcccctggctcagctagtacacaagaacataatataaaatgttccttctgcttagtccctcttcaggagaaaatgtaaatagaagttttttcccatcactgtggggtcaagccatgacttcaaaaggaacttgagttaaaccagtttcagccttggcagcagacatgtgacttggtctcattcctttcccttgggcccagctttcctgagccacaattttattttaaacttggtaggagtttggttttaattatgtgccttcctgaactcctgataactttcaagttaaaagtttttgtggggatttttctaagccagtctctggtgttttgagggccctacacatttcacaaatcaaaaccagtctggtttctgtccctttctaggattgccatctgaattaatgg

SEQ ID NO: 1831 - DNA, 570 bp, Homo sapiens; identical to SEQ ID NO: 1825

SEQ ID NO: 1832 - DNA, 314 bp, Homo sapiens; identical to SEQ ID NO: 1826

SEQ ID NO: 1833 - DNA, 570 bp, Homo sapiens; identical to SEQ ID NO: 1830

SEQ ID NO: 1834 - DNA, 314 bp, Homo sapiens; identical to SEQ ID NO: 1829

SEQ ID NO: 1835 - DNA, 324 bp, Homo sapiens
tgacaattctgggctccagagcatggttccaatggatggcacatagagaactcaaagtcatccatggcaaccacctcatgagatttgaaaagtatgtatgaaaaggaaactgagattttaagactacataattcctagaatttaaactgaatccttggaagagtattttgctttgtttgatttttgtgccaaaggaaaagatttcaaagatgcaggtgcctccaaactgaggttctatcattgatcaccatcaagagtattaaattgatgggaaacaaactggaaatagtcatctctttaaaaagccaacttttttttacaagg

SEQ ID NO: 1836 - DNA, 298 bp, Homo sapiens
ctttgtgaacatgcatgaaggccagaatttgaagctgtaggaagagtttcttcaactccagattttttttaaaagagcactcctctaaatcacctgaaatgttacaaggtagtggaacagaactgtgaatgtttttaaaaactgacaaacaggtatttttaaatcaaagaataatttagaaatgtatggatattaaataccaacattattatgcaaatgctcttagttataaccttaaaataggcagcttattaccttttttaacaaacaaattcatatatactacttattatgtgtc

SEQ ID NO: 1837 - DNA, 298 bp, Homo sapiens
ctttgtgaacatgcatgaaggccagaatttgaagctgtaggaagagtttcttcaactccagatttttttttaaagagcactcctctaaatcacctgaaatgttacaaggtagtggaacagaactgtgaatgtttttaaaaactgacaaacaggtatttttaaatcaaagaataatttagaaatgtatggatattaaataccaacattattatgcaaatgctcttagttataaccttaaaataggcagcttattaccttttttaacaaacaaattcatatatactacttattatgtgtc

SEQ ID NO: 1838 - DNA, 298 bp, Homo sapiens; identical to SEQ ID NO: 1836

SEQ ID NO: 1839 - DNA, 1136 bp, Homo sapiens
ggcaaacgaaataaagaaactgaggaagaactatgagtgaaggaataaaatacataaacatgaatatatcttcataggtatatacaccttatcaaacactatatttttgtagcttctaagtcacctttcccaactttttaattcacatatatgattgagaaaggcactttgtgaatatattttctttaaagatataaaataataccttaaaatgatacagcagagtcaatacgttatacggtagattctaatctggtatggttaggagagctgttatttcaccaaatcaggcatggaaaatcagtaaatagacaagaatgtgatactagtatcaaagcgttgtctgtatatgaagccttaaaagcaaaaaaaccccataaccctgaaaaaaacaaaagtattaataagcttgttttaaaacaactgatttcccagacccacctaacatgcaaagacaagaggaacattcctcactcagtcagaatctacactgaaacttatgtgaatgaacttgacccgggctggcagcaatccagcaatcttcgtcactgaatgacttaacagaacactgtgttcttggcaaaagcacaaaaaatgtgttgaaatccacactaaaaaaaaaaaaaaaatctcagtatagatttaaatcaattttaaaatacaatgataaaagatactaaaatataataagggattttcagtgtttggtacatatttaattcaggtaacatttttaccctcatgccattttggtcactttcaatcttcccttgaacaattgctccaaccctctccccaccacactaaacctacgctctggcctcctcctgtgttacaacttctccaacactgtacctggaaaattccaaagcaacctaagcttgcatattagggagggacagcaagaaaagccagaaacaatgtgttgactcacttccgtggaaagccctagagaaaaatctaggccacagttcagcactctcacgcgttgcagctggagcaggtaagaggcggtgaagttatgtcattctcacacaggtcctgctaattcggccacaagggtaagatgcaaatgagaaggtaagtaaaatacaatctggcgtatatataagtatgcaggcagtctacacactttc

SEQ ID NO: 1840 - DNA, 262 bp, Homo sapiens
tttttttttttacaaaaaaccttcatcggccaggcatggtggctcacgcctgtaatcccagcactttgggaggccaaggtgggtggaccacctgaggccaggagtttagtgaccagctggccaatgtgctgaaaccctgtctttacttaaaatacaaaaattatttaggcgtggtggcgggtgcctgtaatccgagctactcaaaaggctgaggcaggagaatcacttgaactggggaagcagaggttgcagtgagccgaga

SEQ ID NO: 1841 - DNA, 575 bp, Homo sapiens
tttttgagatagagtcccgctctgtcgcctggctggagtgcagtggcatgatcttggctcactgcaacctttgcctcctgggttcaagcaattctcctgcctcagcctcccaagtagctgggactacaagtgcatgccaccacgcccagctaatttttgtatttttagtagagatggggtttcaccacgttggccaggatggtctcgatctctcaacctcatcgactcggcctaccaaagcattgagattacaggcgtgagccaccacgcctggcagaaagaataacttttcaagttactttacttagtttttgccatcctccttttcccctactttaaattttgcgtctcccagaatgccatccttgttatataacatcatgatagttcattctcaccattagcaaaagcagttcacaaccacctcatactctggggaaaacctacacaaggcctaaagcgttcagagtgaacaagatccaaaccacaaacatttagcagtctacgctggcagaatccaccacaatgaaaaatgtttagcccttcctttcacccctcaacattgtagttttcag

SEQ ID NO: 1842 - DNA, 2090 bp, Homo sapiens
agaactgtaagacagtgtgtcagaatggattcagttgcagagcaggaagcctggatcccagcgccggacggaaatgagaggtcgatggtgcaggctggtgtggggattcctccaccgtcagggcccaggctccttctcaggtctcagtctcactcttcttagcacgaggtcaggtctcattccttggctgcgggagctccagccagcacacgttttaggaagaaggaggaaggaagaaggtaaagggtggatggcagctgcctcctcctctcttggaagctcacagagcgctgggtcacaattccctgggtagaactggatcacacaggcacccctgtcagcaaaagaggctggaaaaagtatttctgaagctgaatcaaattaagattcctgttactaagaagggagtgattgtatgggcgactacagggaccacggccatacacggtgcctggaagaccaagcttgtgacagtgacgaggatttggagagggcagggtgatggggagctttggggggagtgcattaggaaccctgacctggagaggggcagaatgaaacctgcgggcccctaaccctagtgggttgtttgagaaacctgtcctactgtggcagggggctgagtcttctcagggtcatgcatgaaaactgaaattcctgaaggccacacacagccccggaagtgctgactgacaagggcacatgccagtgatgcagttttcttttttgtcttcacttttgttgttccgccgtcttcaacacatggctcccagctcacagcaaatgctgccctggttcagctaccaggaagcaggagaggggaagggagggcaagcctcattctttatggaacaaaagcagtgggcagacagccttccctcacgttccactcactggaatgtggtctggctgccttccctgcaggaggtgggatgcaccctcagtgcagcagccctgccccagccaaaaacgtctcagcacagctgtaagaagaggaagatggctagagacaggcagccttccctgcaagggcaatgaggcaagcctgccaaaagcctcctttggaaatactgtttgattacttttcagagtttctatttaggaaaagggcaaaacctttcaggatcaggagtaggtgagcggcgatcaggcctcactcttcaccgagggccttccctgaggaggggcctgcaggacgctggcagcggaatggggctgtgtggctgctagattaggtcatggcagggagacagcctcttcctggttcttgctagaacaggcacacttggggccttgagctccagggagttcatggaagacatctgactaccctgagccccttgctggagggttctggggagtggcccacggccaccgtcacccatggccaccgtcacccacaggggccgtgaggacatccctggccagcatctaacacaaccacatgggatgccctaagcaactactgcccagccgagggctgcctgaatttctgactcacaaatggtgggcaatgtgaaacgggtattttaagctgctgagttctgcgggagtttgctgagcaacagtagaaaccagaactctcggatactgtgttctgtccttgaaacggtggaagattttatgtgaccagaatggaatgtttgaacaaatattttgagaatagaattttaaaacatttactcatcagcatccaagggtggggagcagtgtcatctaggagactggttctattatttacgtagatgttcttgaattaaaggatgggaatattttttccttccaaaactttttttcaattttatattctgtttttcaagtttttattatgaaaatattcaaactcacagggaagttgaaagactaatacaaagaagaaccatactctttccactgacatgatccaacgaggaatattttgccacacggcaaatatataccgtataattttctgtaccacttgatagaaaggtaaagaatgaatattgttttttaaataacttttttcgtatataagtaatatgtgcttatcgtgtaactacctaaaaacattgaaaaataaaaggaaaataaaattcatacataaccgc

SEQ ID NO: 1843 - DNA, 2091 bp, Homo sapiens
agaactgtaagacagtgtgtcagaatggattcagttgcagagcaggaagcctggatcccagcgccggacggaaatgagaggtcgatggtgcaggctggtgtgggggttcctccaccgtcagggcccaggctccttctcaggtctcagtctcactcttcttagcacgaggtcaggtctcattccttggctgcgggagctccagccagcacacgttttaggaagaaggaggaaggaagaaggtaaagggtggatggcagctgcctcctcctctcttggaagctcacagagcgctgggtcacaattccctgggtagaactggatcacacaggcacccctgtcagcaaaagaggctggaaaaagtatttctgaagctgaatcaaattaagattcctgttactaagaagggagtgattgtatgggcgactacagggtaccacggccatacacggtgcctggaagaccaagcttgtgacagtgacgaggatttggagagggcagggtgatggggagctttggggggagtgcattaggaaccctgacctggagaggggcagaatgaaacctgcgggcccctaaccctagtgggttgtttgagaaacctgtcctactgtggcagggggctgagtcttctcagggtcatgcatgaaaactgaaattcctgaaggccacacacagccccggaagtgctgactgacaagggcacatgccagtgatgcagttttcttttttgtcttcacttttgttgttccgccgtcttcaacacatggctcccagctcacagcaaatgctgccctggttcagctaccaggaagcaggagaggggaagggagggcaagcctcattctttatggaacaaaagcagtgggcagacagccttccctcacgttccactcactggaatgtggtctggctgccttccctgcaggaggtgggatgcaccctcagtgcagcagccctgccccagccaaaaacgtctcagcacagctgtaagaagaggaagatggctagagacaggcagccttccctgcaagggcaatgaggcaagcctgccaaaagcctcctttggaaatactgtttgattacttttcagagtttctatttaggaaaagggcaaaacctttcaggatcaggagtaggtgagcggcgatcaggcctcactcttcaccgagggccttccctgaggaggggcctgcaggacgctggcagcggaatggggctgtgtggctgctagattaggtcatggcagggagacagcctcttcctggttcttgctagaacaggcacacttggggccttgagctccagggagttcatggaagacatctgactaccctgagccccttgctggagggttctggggagtggcccacggccaccgtcacccatggccaccgtcacccacaggggccgtgaggacatccctggccagcatctaacacaaccacatgggatgccctaagcaactactgcccagccgagggctgcctgaatttctgactcacaaatggtgggcaatgtgaaacgggtattttaagctgctgagttctgcgggagtttgctgagcaacagtagaaaccagaactctcggatactgtgttctgtccttgaaacggtggaagattttatgtgaccagaatggaatgtttgaacaaatattttgagaatagaattttaaaacatttactcatcagcatccaagggtggggagcagtgtcatctaggagactggttctattatttacgtagatgttcttgaattaaaggatgggaatattttttccttccaaaactttttttcaattttatattctgtttttcaagtttttattatgaaaatattcaaactcacagggaagttgaaagactaatacaaagaagaaccatactctttccactgacatgatccaacgaggaatattttgccacacggcaaatatataccgtataattttctgtaccacttgatagaaaggtaaagaatgaatattgttttttaaataacttttttcgtatataagtaatatgtgcttatcgtgtaactacctaaaaacattgaaaaataaaaggaaaataaaattcatacataaccgc

SEQ ID NO: 1844 - DNA, 292 bp, Homo sapiens
tggccgggtgcggtggctctcgcctgtaatcccagcactttgggaggctgaggtgggtggatcacgaggtcaggagatcgagaccatcctggctaacacggtgaaaccccgtctctactaaaaatacaaaaaattagctggtcgtggtgaagggcgcctgtagtcccagctactcggggggctgaggcaggagaatgggtgaacccgggaggcggagcttgcagtgagccgagatcacaccgctgcactccagcctgggagacagtgcgagactcctctcaaaaaaaaaaaa

SEQ ID NO: 1845 - DNA, 942 bp, Homo sapiens
tcctgctctcactgtgggttcctgctcactctgtctccaggacagactgccttccgggcagccttccctcctcaagcctcttggcctttgcaatcctcttacctgggtcactggtgggatctcatttgtggatcgagtcgcccccagtgtagacaaatgtctgatggagtctggccaaggccctcctgagccttcactgggccctgcatgagaagcctgccaaggctgaggggccagggaaacggagacgaagccctcagagcaggccaagagggtgggaggtggggggcatttagagggttagatacagagcacccctttacaaataccagctactggcttttcgtattacatgttcattttagatacaacatactgcacacgctcccttaacgtgtgtttacgcgtgggtggtgtatccttccagacgtcttcctcacatctatacataatatgcatagataaaacatttaccaccaaaacccatagtgttatgtacatatttgtctggctatgtaactttaaataacatacaaatgtatagaacagaagcttgccctctttctgaaatatctaacgtgggatttcaggctttctgatgagacctctgtagaggtcagtgttttgccaccagaggtccttcagcctccatctgttctcccacctacccacattctggcccctggcaattcacagggagtttaggaagtagacaccagggccctatttcctggagaccagcctggtggccgatgtcatagagtgcggtgggcctgggccggccctgctctgggcccgtgacctgcgtgtctgactcgggtccagctgttcttcctgccagagcctcttcctgtgaggcgggggtaacacaaccttctgtggtggctgtgggattaatccgtatggctgcattgtgagtaaagcctggtggaaatctctgtc

SEQ ID NO: 1846 - DNA, 942 bp, Homo sapiens
tcctgctctcactgtgggttcctgctcactctgtctccaggacagactgccttccgggcagccttccctcctcaagcctcttggcctttgcaatcctcttacctgggtcactggtgggatctcatttgtggatcaagtcgcccccagtggagacaaatgtctgatggagtctggccaaggccctcctgagccttcactgggccctgcatgagaagcctgccaaggctgaggggccagggaaacggagacgaagccctcagagcaggccaagagggtgggaggtggggggcatttagagggttagatacagagcacccctttacaaataccagctactggcttttcgtattacatgttcattttagatacaacatactgcacacgctcccttaacgtgtgtttacgcgtgggtggtgtatccttccagacgtcttcctcacatctatacataatatgcatagataaaacatttaccaccaaaacccatagtgttatgtacatatttgtctggctgtgtaactttaaataacatacaaatgtatagaacagaagcttgccctctttctgaaatatctaacgtgggatttcaggctttctgatgagacctctgtagaggtcagtgttttgccaccagaggtccttcagcctccatctgttctcccacctacccacattctggcccctggcaattcacagggagtttaggaagtagacaccagggccctatttcctggagaccagcctggtggccgatgtcatagagtgcggtgggcctgggccggccctgctctgggcccgtgacctgcgtgtctgactcgggtccagctgttcttcctgccagagcctcttcctgtgaggcgggggtaacacaaccttctgtggtggctgtgggattaatccgtatggctgcattgtgagtaaagcctggtggaaatctctgtc

SEQ ID NO: 1847 - DNA, 292 bp, Homo sapiens; identical to SEQ ID NO: 1844

SEQ ID NO: 1848 - DNA, 545 bp, Homo sapiens
gaaccatatccacaataccagaatctaagattcccactctgaaagagtaactagaacaacttctttttgaggcaattctgcttacttagcacattactcccccctacagttttccttcttttgtttttgtactaaggatatttgtataaaaacaggatctttgttgcttagtaattcatctgattcagctgcttgtattctgttcccaatcaaaattcttggttttcagcctcctcatcatttttataaggagttgaatgaattggtcaagcttgttcctttctccctctccatggaacaccaggccccaagctccccgacactgctcctctttttatttctatctttgggttgtgtgtacactctagaacacttgtatcagtgaagagtgtaacaaagtattgtgccacgcatagtctctcatatatcatctatcagctcatcaaaaagtgctcactgattaacagaggatcccctcctcagtttcagaattctctagctttaagttaggggagggttaccccaaagtcagagagggtacaggg

SEQ ID NO: 1849 - DNA, 688 bp, Homo sapiens
  SITE (3): n equals a,t,g, or c
ccnagtttttgaatctctagctttaagttatgtcagggttaccccaaagtcagagagggtacatgggagagggttgtgaaggccagtagcccagagaaaatcaagggcagctgggtgcatttaggtggataagaaaacaatgaattactccatcaaaagcaaaagcacaagcacatagtaaagttgatcacccactgttaatgtcaattcagtttaaagcactttattaaccacacatacatattttccagtgtctaattctcatcgtgttcttttccattccagacttccctgtctctttcccagagctctgttcctcttctcactgtttctacaaaagggacaataaacaattttctagccactcatcatcataaaccctgacatgctaaattatcccctgctcagtttatggaccacagtgggcccataaaactcctccctcactagcaacccaccccacacaaaattctcacttccctttttccttgcgcttcctaaaaaaagcaattgagccacacccactacctcctgtgctaggggtttgtcccctaatcctgggacactagggagctccttacctggaaggcagttgcactcaaaagtgaagtcaccagtctgccgacaggtgcctccattgacacaaggcgagggtgcacagggcacatacaggctgtcacagtactgg

SEQ ID NO: 1850 - DNA, 3095 bp, Homo sapiens
cattatgaaaaggactttttaaaagaaaaccatctctaggcactatttccctttgtggaaatgaactgaatattttctgaactccacctgggacatacgaacaatgagcatgaaatcttacaaactgtataaataacatttattcacagtgtcactgcatcatctattgttttgaattctctttaaatttccttctatatatttatccaaagctgaagtcatctggtttagattatgggaccctgaaaagcaagaactagtctatgtaactacttttaaacatctgcacaatgcgatatatatatatataccacacacacacacacacacacacacatattgatatgtaacaagtactatttgattataattaggagtgtcttggttttcttataacatgaacatatatttttaacccaaacagcttaaagcatttaacgaaaagttttacacacctacaaagtgctttcaggaagcagatgtgcagtgcaatgtggcgcagtaagatgcacaaagcaaaggctttgaaaataaactgcctcggtttcaggacccagcctaaccacatattagctgtacaactttgggtgaatcacttaacatctccaaacttcagttacttcatgtgggaagacttgaaaaataatacctggtcccaagatttttgtgtaattgagctaataagcatggaagtacctggcacagttcctgagtcaccaaaaaaatgttagttttctcttcatcaaatctccccattcccacccctcatgctaatctcccctcccacacacacacacaccatcagtgagtaaataagtgtcttgcgttaaactacaaccagagaataagagacagccaagatttccttactctatttcactagccctggcagcctctcagctgcggaatccttggttatttcctttctcaaggaggagatactattctagtttgacagatcctttcctggacacactctcagaattccctaaggttcttatcgtggctaatggataacaatgcagaggctatgggagtgaataatcactctctctcagctaaaaacttcctttattgacttctctaacttcccgtcaacatcttgctgccaaatcaacctcttgttctaggcaattattaaaagcaattttcttgaaactgaaaaacacatttagccttcaacaataaatcacactaacatcaattactagccaattagattactagaatatcagacccagagatatttgcagtgttgaaatattttcaaaataaagttgtttacatttctatttctgtctttaatccttaaaatgcaaacaaatacaggagtgaagacagatgtattttagttatttcttctacaagataaagtggatagtaatattatgttaagaaaatacttatttagtatctagaatgatagcattatctattctttattaaaagagaaactaaaagtaatataattaaatagcttgttcttgtgacttaaataatataaaattttcatttcaattatgtgacaatgctttgtatagctgtattccaaatacacagcatggtgcctagaacatagcaggcagtcaatacatttttaccaaatgaaatgaataaattaccagttgattttatactgaggaccaaactatgacctttaattcctccaaaataaaacacacaatcccattatatgtgaaccatatccacaataccagaatctaagattcccactctgaaagagtaactagaacaacttcttttggaggcaattctgcttacttagcacattactcccccctacagttttccttcttttgtttttgtactaaggatatttgtataaaaacaggatctttgttgcttagtaattcatctgcttcagctgcttgtattctgttcccaatcaaaattcttggttttcagcctcctcatcatttttataaggagttgaatgaattggccaagcttgttcctttctccctctccatggaacaccaggccccaagctccccgacactgctcctctttttatttctatctttgggttgtgtgtgcactctagaacacttgtatcagtgaagagtgtaacaaagtattgtgccacgcatagtctctcatatatcatctatcagctcatcaaaaagtgctcactgattaacagaggatcccctcctcagtttcagaattctctagctttaagttaggggagggttaccccaaagtcagagagggtacatgggagagggttgtgaaggccagtagcccagagaaaatcaagggcagctgggtgcatttaggtggataagaaaacaatgaattactccatcaaaagcaaaagcacaagcacatagtaaagttgatcacctactgttaatgtcaattcagtttaaagcactttattaaccacacatacatattttccagtgtctaattctcatcgtgttcttttccattccagacttccctgtctctttcccagagctctgttcctcttctcactgtttctacaaaagggacaataaacaattttctagccactcatcatcataaaccctgacatgctaaattatcccctgctcagtttatggaccacagtgggcccataaaactcctccctcactagcaacccaccccacacaatattctcacttccctttttccttgcgcttcctaaaaaaagcaattgagccacacccactacctcctgtgctaggggtttgtcccctaatcctgggacactagggagctccttacctggaaggcagttgcactcaaaagtgaagtcaccagtctgccgacaggtgcctccattgacacaaggcgagggtgcacagggcacatacaggctgtcacagtactggcctgtgaagccctgaaggcactggcactggtaggaaccaggcaggttgaggcaggtgccaccatgctggcagtgtcctggaatgtcacactcattgacatcagtctcacacttctgccctgtgaagcctgtgaggcatttgcaggagaactggttggccacagtggtacaggtacttccatttgcacagggatgagacaggcaggcatcggtccattggcactccttacct

SEQ ID NO: 1851 - DNA, 2763 bp, Homo sapiens
acacatattgatatgtaacaagtactatttgattataattaggagtgtcttggttttcttataacatgaacatatatttttaacccaaacagcttaaagcatttaacgaaaagttttacacacctacaaagtgctttcaggaagcagatgtgcagtgcaatgtggcgcagtaagatgcacaaagcaaaggctttgaaaataaactgcctcggtttcaggacccagcctaaccacatattagctgtacaactttgggtgaatcacttaacatctccaaacttcagttacttcatgtgggaagacttgaaaaataatacctggtcccaagatttttgtgtaattgagctaataagcatggaagtacctggcacagttcctgagtcaccaaaaaaatgttagttttctcttcatcgaatctccccattcccacccctcatgctaatctcccctcccacacacacacacaccatcagtgagtaaataagtgtcttgcgttaaactacaaccagagaataagagacagccaagatttccttactctatttcactagccctggcagcctctcagctgcggaatccttggttatttcctttctcaaggaggagatactattctagtttgacagatcctttcctggacacactctcagaattccctaaggttcttatcgtggctaatggataacaatgcagaggctatgggagtgaataatcactctctctcagctaaaaacttcctttattgacttctctaacttcccgtcaacatcttgctgccaaatcaacctcttgttctaggcaattattaaaagcaattttcttgaaactgaaaaacacatttagccttcaacaataaatcacactaacatcaattactagccaattagattactagaatatcagacccagagatatttgcagtgttgaaatattttcaaaataaagttgtttacatttctatttctgtctttaatccttaaaatgcaaacaaatacaggagtgaagacagatgtattttagttatttcttctacaagataaagtggatagtaatattatgttaagaaaatacttatttagtatctagaatgatagcattatctattctttattaaaagagaaactaaaagtaatataattaaatagcttgttcttgtgacttaaataatataaaattttcatttcaattatgtgacaatgctttgtatagctgtattccaaatacatagcatggtgcctagaacatagcaggcagtcaatacatttttaccaaatgaaatgaataaattaccagttgattttatactgaggaccaaactatgacctttaatccctccaaaataaaacacacaatcccattatatgtgaaccatatccacaataccagaatctaagattcccactctgaaagagtaactagaacaacttctttttgaggcaattctgcttacttagcacattactcccccctacagttttccttcttttgtttttgtactaaggatatttgtataaaaacaggatctttgttgcttagtaattcatctgattcagctgcttgtattctgttcccaatcaaaattcttggttttcagcctcctcatcatttttataaggagttgaatgaattggtcaagcttgttcctttctccctctccatggaacaccaggccccaagctccccgacactgctcctctttttatttctatctttgggttgtgtgtacactctagaacacttgtatcagtgaagagtgtaacaaagtattgtgccacgcatagtctctcatatatcatctatcagctcatcaaaaagtgctcactgattaacagaggatcccctcctcagtttcagaattctctagctttaagttaggggagggttaccccaaagtcagagagggtacatgggagagggttgtgaaggccagtagcccagagaaaatcaagggcagctgggtgcatttaggtggataagaaaacaatgaattactccatcaaaagcaaaagcacaagcacatagtaaagttgatcacccactgttaatgtcaattcagtttaaagcactttattaaccacacatacatattttccagtgtctaattctcatcgtgttcttttccattccagacttccctgtctctttcccagagctctgttcctcttctcactgtttctacaaaagggacaataaacaattttctagccactcatcatcataaaccctgacatgctaaattatcccctgctcagtttatggaccacagtgggcccataaaactcctccctcactagcaacccaccccacacaaaattctcacttccctttttccttgcgcttcctaaaaaaagcaattgagccacacccactacctcctgtgctaggggtttgtcccctaatcctgggacactagggagctccttacctggaaggcagttgcactcaaaagtgaagtcaccagtctgccgacaggtgcctccattgacacaaggcgagggtgcacagggcacatacaggctgtcacagtactggcctgtgaagccctgaaggcactggcactggtaggaaccaggcaggttgaggcaggtgccaccatgctggcagtgtcctggaatgtcacactcattgacatcagtctcacacttctgccctgtgaagcctgtgaggcatttgcaggagaactggttggccacagtggtacaggtacttccatttgcacagggatgagacaggcaggcatcggtccattggcactccttacct

SEQ ID NO: 1852 - DNA, 3078 bp, Homo sapiens
tctctaggcactatttccctttgtggaaatgaagtgaatattttctgaactccacctgggacatacgaacaatgagcatgaaatcttacaaactgtataaataacatttattcacagtgtcactgcatcatctattgttttgaattctctttaaatttccttctatatatttatccaaagctgaagtcatctggtttagattatgggaccctgaaaagcaagaactagtctatgtaactacttttaaacatctgcacaatgccatatatatatacacacacacacacacacacacacacacacacacacacacacatattgatatgtaacaagtactatttgattataattaggagtgtcttggttttcttataacatgaacatatatttttaacccaaacagcttaaagcatttaacgaaaagttttacacacctacaaagtgctttcaggaagcagatgtgcagtgcaatgtggcgcagtaagatgcacaaagcaaaggctttgaaaataaactgcctcggtttcaggacccagcctaaccacatattagctgtacaactttgggtgaatcacttaacatctccaaacttcagttacttcatgtgggaagacttgaaaaataatacctggtcccaagatttttgtgtaattgagctaataagcatggaagtacctggcacagttcctgagtcaccaaaaaaatgttagttttctcttcatcaaatctccccattcccacccctcatgctaatctcccctcccacatacacacacaccatcagtgagtaaataagtgtcttgcgttaaactacaaccagagaataagagacagccaagatttccttactctatttcactagccctggcagcctctcagctgcggaatccttggttatttcctttctcaaggaggagatactattctagtttgacagatcctttcctggacacactctcagaattccctaaggttcttatcgtggctaatggataacaatgcagaggctatgggagtgaataatcactctctctcagctaaaaacttcctttattgacttctctaacttcccgtcaacatcttgctgccaaatcaacctcttgttctaggcaattattaaaagcaattttcttgaaactgaaaaacacatttagccttcaacaataaatcacactaacatcaattactagccaattagattactagaatatcagacccagagatatttgcaatattgaaatattttcaaaataaagttgtttacatttctatttctgtctttaacccttaaaatgcaaacaaatgcaggagtgaagacagacgtattttagttatttcttctacaagataaagtgaatagtaatattatgttaagaaaacacttatttagtatctagaatgatagcattatctattctttattaaaagagaaactaaaagtaatataattaaatagcttgttcttgtgacttaaataatataaagttttcatttcaattatgtgacaatgctttgtatagctgtattccaaatacatagcatggtgcctagaacatagcaggcagtcaatacatttttaccaaatgaaatgaataaattaccagttgattttatactgaggaccaacctatgacctttaatctctccaaaataaaacacacaatcccattatatgtgaaccatatccacaataccagaatctaagattcccactctgaaagagtaactagaacaacttctttttgaggcaattctgcttacttagcacattactcccccctacagttttccttcttttgtttttgtactaaggatatttgtataaaaacaggatctttgttgcttagtaattcatctgctccagctgcttgtattctgttcccaatcaaaattcttggttttcagcctcctcatcatttttataaggagttgaatgaattggccaggcttgttcctttctccctctccatggaacaccaggccccaagctccccgacactgctcctctttttgtttctatctttgggttgtgtgtgcactctagaacacttgtatcagtgaagagtgtaacaaagtattgtgccacgcatagtctctcatatatcatctatcagctcatcaaaaagtgctcactgattaacagaggatcccctcctcagtttcagaattctctagctttaagttaggggagggttaccccaaagtcagagagggtacatgggagagggttgtgaaggccagtagcccagagaaaatcaagggcagctgggtgcatttaggtggataagaaaacaatgaattactccatcaaaagcaaaagcacaagcacataggaaagttgatcacctactgttaatgtcaattcagtttaaagcactttattaaccacacatacatattttccagtgtctaattctcatcgtgttcttttccattccagacttgcctgtccctttcccagagctctgttcctcttatttctcactgtttctacaaaagggacaataaacaattttctagccactcatcatcataaaccctgacatgctaaattatcccctgctcagtttatggaccacagtgggcccataaaactcctccctcactagcaacccaccccacacaaaattctcacttccctttttccttgggcttcctaaaaacagcaattgagccacacccactacctcctgtgctaggggtttgtcccctaatcctgggacactagggagctccttacctggaaggcagttgcactcaaaagtgaagtcaccagtctgccgacaggtgcctccattgacacaaggtgagggtgcacagggcacatacaggctgtcacagtactggcctgtgaagccctgagggcactggcactggtaggaaccaggcaggttgaggcaggtgccaccatgctggcagtgtcctggaatgtcacactcattgacatcagtctcacatttctgccctgtgaagcctgtgaggcatttgcaggagaactggttggccacagtggtacaggtacttccatttgcacagggatgagacaggcaggcatccgtccattggcactccttacct

SEQ ID NO: 1853 - DNA, 3096 bp, Homo sapiens
cattatgaaaaggactttttaaaagaaaaccatctctaggcactatttccctttgtggaaatgaactgaatattttctgaactccacctgggacatacgaacaatgagcatgaaatcttacaaactgtataaataacatttattcacagtgtcactgcatcatctattgttttgaattctctttaaatttccttctatatatttatccaaagctgaagtcatctggtttagattatgggaccctgaaaagcaagaactagtctatgtaactacttttaaacatctgcacaatgcgatatatatatatataccacacacacacacacacacacacacatattgatatgtaacaagtactatttgattataattaggagtgtcttggttttcttataacatgaacatatatttttaacccaaacagcttaaagcatttaacgaaaatttttacacacctacaaagtgctttcaagaagcagatgtgcagtgcaatgtggcgcagtaagatgcacaaagcaaaggctttgaaaataaactgcctcggtttcaggacccagcctaaccacatattagctgtacaactttgggtgaatcacttaacatctccaaacttcagttacttcatgtgggaagacttgaaaaataatacctggtcccaagatttttgcgtaattgagctaataagcatggaagtacctggcacagctcctgagtcaccaaaaaaatgttagttttctcttcatcaaatctccccattcccacccctcatgctaatctcccctcccacacacacacacaccatcagtgagtaaataagtgtcttgcgttaaactacaaccagagaataagagacagccaagatttccttactctatttcactagccctggcagcctctcagctgcggaatccttggttatttcctttctcaaggaggagatactattctagtttgacagatcctttcctggacacactctcagaattccctaaggttcttatcgtggctaatggataacaatgcagaggctatgggagtgaataatcactctctctcagctaaaaacttcctttattgacttctctaacttcccgtcaacatcttgctgccaaatcaacctcttgttctaggcaattattaaaagcaattttcttgaaactgaaaaacacatttagccttcaacaataaatcacactaacatcaattactagccaattagattactagaatatcagacccagagatatttgcagtgttgaaatattttcaaaataaagttgtttacatttctatttctgtctttaatccttaaaatgcaatcaaatacaggagtgaagacagatgtattttagttatttcttctacaacataaagtgtatatgtaatagtatgttaagaaaatacttatttagtatctagaatgatagcattatctattctttattaaaagagaaactaaaagtaatataattaaatagcttgttcttgtggggtaaataatataaaattttcatttcaattatgtgacaatgctttgtatagctgtattccaaatacacagcatggtgcctagaacatagcaggcagtcaatacatttttaccaaatgaaatgaataaattacaagttgattttatactgaggaccaaactatgacctttaattcctccaaaataaaacacacaatcccattatatgtgagccatatccacaataccagaatctaagattcccactctgaaagagtaactagaacaacttcttttggaggcaattctgcttacttagcacattactcccccctacagttttccttcttttgtttttgtactaaggatatttgtataaaaacaggatctttgttgcttagtaattcatctgcttcagctgcttgtattctgttcccaatcaaaattcttggttttcagcctcctcatcatttttataaggagttgaatgaattggccaagcttgttcctttctccctctccatggaacaccaggccccaagctccccgacactgctcctctttttatttctatctttgggttgtgtgtgcactctagaacacttgtatcagtgaagagtgtaacaaagtattgtgccacgcatagtctctcatatatcatctatcagctcatcaaaaagtgctcactgattaacagaggatcccctcctcagtttcagaattctctagctttaagttaggggagggttaccccaaagtcagagagggtacatgggagagggttgtgaaggccagtagcccagagaaaatcaagggcagctgggtgcatttaggtggataagaaaacaatgaattactccatcaaaagcaaaagcacaagcacatagtaaagttgatcacctactgttaatgtcaattcagtttaaagcactttattaaccacacatacatattttccagtgtctaattctcatcgtgttcttttccattccagacttccctgtctctttcccagagctctgttcctcttctcactgtttctacaaaagggacaataaacaattttctagccactcatcatcataaaccctgacatgctaaataatcccctgctcagtttatggaccacagtgggcccataaaactcctccctcactagcaacccaccccacacaatattctcacttccctttttccttgcgcttcctaaaaaaagcaattgagccacacccactacctcctgtgctaggggtttgtcccctaatcctgggacactagggagctccttacctggaaggcagttgcactcaaaagtgaagtcaccagtctgccgacaggtgcctccattgacacaaggcgagggtgcacagggcacatacaggctgtcacagtactggcctgtgaagccctgaaggcactggcactggtaggaaccaggcaggttgaggcaggtgccaccatgctggcagtgtcctggaatgtcacactcattgacatcagtctcacacttctgccctgtgaagcctgtgaggcatttgcaggagaactggttggccacagtggtacaggtacttccatttgcacagggatgagacaggcaggcatcggtccattggcactccttacct

SEQ ID NO: 1854 - DNA, 1230 bp, Homo sapiens
attgtggcaccattttatgacaggcactatgctggggatgctggcgactagggtagggagttaaaatgagagtgtctacttggaaagatgaacagataaataatcaccgtggtaagtgctgtgctagagatatgcagatgtcaaaagaccttagaaggtctacaatccacttggagggtagggaatatagaaggcatttcagtgaaatagggtgcctttgacaaatcattaagaatgagttctacattaaaaaggggaagagagggtgatagctgaggaggcagcataggcaagaacatccagcatgaaagaacagtgaaggacatcaggaacatctttcaggaacatcaggtaaaacagacttagggcccaagtcaaaggagctaaaataatacaccctggaaagtggtatgatcatttctgcatctgctccagagaaacctgccaaaatatgattagcataatacccaagagaacatcacattccccatgtgtgaaaatgcaagagggagttatttctaatagttcataagctcagcaacaacagagtagacacaaaagccacagaatgtgcttaggctttactttaatgatatagggatatcacatatcatcagcctgtggagtacagaggtagtttacaaaggataaaccttcattgtttggaaaggaaagatcagagagctctttatgaagtttaaacaaaatcagagaaataaagagatgtgggaaagaaagaaaaaaaagaaagtacattgaggacagtccaatctaactgtgaactcataagggacagccagtaaattcaaaacagcctactgttttttgattacttgtgctactctattaaaatagccacaaacacaaaactagtctacctctttctctccccattattggccctaacccaaaaatagtgggagtaaatgatttaataatttattttcatgctccattttgttcttaagttaaaattactgtggttggtgcccctcctttagcttctgctaaagactttacataatgaaagctcatgaagtgtctggattactaacagttacttatccaaaaagatgagacatggttcattgatttgattctattagttctctcttgaagatatttttctcctccctctgtgaagaaacatttctttctgtgtcatacaagacgcgtcatttttgtagttttaattccctcttgagtcctacagtaatactaaaatactca

SEQ ID NO: 1855 - DNA, 123 bp, Homo sapiens
acttggaaggctgaggcagaagaatcacttgaacccaggaggcggaggttgcagtgagccgagattgtaccactgcactccagcctgggcaacacagcaagactccatttcaaaaaaaaaaaa

SEQ ID NO: 1856 - DNA, 289 bp, Homo sapiens
tctccaggcactattcccctttgtggaaatgaagagaatattttctgaactccacctgggacatatgaacaatgagcatgaaatcttacaaactgtataaataacatttattcacagtgtcactgcatcatctattgttttgaattctctttaaatttccttctatatatttatccaaagctgaagtcatctggtttagattatgggaccctgaaaagcaagaactagtctatgtaactacttttaaacatctgcacaacgccatacacacacacacacacacacacac

SEQ ID NO: 1857 - DNA, 555 bp, Homo sapiens
ttgaatttttattattattattattatactttaagttctagggtacacgtgcacaacatgcaggtttgttacatatgtatatatgtgccatgttggtgtgctgcacccattaactcgtcatttacattaggtacatctcctaatgctatccctcccccgtcccaccaccccacgacaggccccggtttgtgatgttccccttcctgtgtccaagtgttctcattgttcaattcccacctatgagtgagaacatgcggtgtttagttttttgtccttgcaatagtttgctgagaatgatggtttccagcttcatccatgtccctacaaaggacatgaactcatccttttttatggctgaatagtattccatggtgtatatgtgccacattttcttaatccagtctatcattgatggacatttgggttggttccaagtctttgctattgtgaatagtgccgcaataaacatacgtgtgcatgtgtctttatagcagcacgatttataattctttgggtatatacccagtaatgggatggcgagaactccttgaattt

SEQ ID NO: 1858 - DNA, 561 bp, Homo sapiens
tccttgaatttttattattattattattattatactttaagttctagggtacacgtgcacaacatgcaggtttgttacatatgtatatatgtgccatgttggtgtgctgcacccattaactcgtcatttacattaggtacatctcctaatgctatccctcccccgtcccaccaccccacgacaggccccggtttgtgatgttccccttcctgtgtccaagtgttctcattgttcaattcccacctatgagtgagaacatgcggtgtttggttttttgtccttgcaatagtttgctgagaatgatggtttccagcttcatccatgtccctacaaaggacatgaactcatccttttttatggctgaatagtattccatggtgtatatgtgccacattttcttaatccagtctatcattgatggacatttgggttggttccaagtctttgctattgtgaatagtgccgcaataaacatacgtgtgcatgtgtctttatagcagcacgatttataattctttgggtatatatccagtaacgggatggcgagaactccttgaattt

SEQ ID NO: 1859 - DNA, 2529 bp, Homo sapiens
ggctatatgaaaagttacaaggcacttcttaaaaatatatcttaggtttttagggaaaggtaaacagacaagtttccagacccgtgggtggaatggatgtagcagattcactgagaggctcacagtgccgtactaaagggagtctactgcttaaagccaattcacatccttaaaaggtcaaatggagagaaattaaacttgggagaagcattttaagactgtgctgttacaaaacctcgggccacttaactgattaatcatggcaatgagggcagggaccagaaaagagtctttagaacctgtcatccccacacagaagagcaactttcagggaaacacccttatctttccattttcagaccccgggaggtgtgagggtggaaagcctaggtagagaagagagcagaaaggagatgagatgacacaaccaggattctccgaagctgggcttgaagtcctcaagaaaaactcccatgaacaaggaaggaagagtgaagaaaaaaacagggatacctggaactggacaaaagtaaaaagatagaaggatactttttttcccccagaagaagtctgtcacaaaagcaaacctgcaaatatacgatcagtataacacccaagaaaatgacacatgcggccaggcatggtggctcatgcctggaatcccagcactttgagaagccgaggcaggtggatcacctgagatcaggagttcgaggccaacctgaccaacatggtgaaaccccatctctactaaaaatacaaaaattagctgagcatggtggcaggcacctgtagtcccagctacttggaaggctgagacatgagaatagcttgaacccgggaggtggaggttgcagtgagccgagatagcgccattgcactccagcctgggagaaagagcgatgctccgtctcaaaaaaaaaaaaaaaaagaaaagaaaagaaaagaaaatgacgcatgcccccaagtgtgagaatgcaagagggaatccctgacctatccctatccaaccagttttcttggcacacaacttccattctctgaatgagcccagattaactcactgacccctgtgccacgtatcgcccactccatcacccgcccaggctcactgcttccacctgcgtcccttcatatctccctactgacctccacttttttctaactttgtcaccaaagaagtcacagaaataaataggaggattcaaaaagaataatttcagtacatttaaaaaattgtagaatataggattctcatctatgtttatcacgttcaattcattcatttttcaaattttcattgtggcaccattttatgacaggcactatgctggggatgctggcgactagggtagggagttaaaatgagagtgtctacttggaaagatgaacagataaataatcaccgtgataagtgctgtgctagagatatgcagatgtcaaaagaccttagaaggtctacaatccacttggagggtagggaatatagaaggcatttcagtgaaatagggtgcctttgacaaatcattaagaatgagttctacattaaaaaggggaagagagggtgatagctgaggaggcagcataggcaagaacatccagcatgaaagaacagtgagggacatcaggaacatctttcaggaacatcaggtaaaacagacttagggcccaagtcaaaggagctaaaataatacaccctggaaagtggtatgatcatttctgcatctgcttcagagaaacctgccaaaatatgattagcataatacccaagagaacatcacattccccatgtgtgaaaatgcaagagggaattatttctaatagttcataagctcagcaacaacagagtagacacaaaagccacagaatgtgcttaggctttactttaatgatatagggatatcatatatcatcagcctgtggagtacagaggtagtttacaaaggataaaccttcattgtttggaaaggaaagatcagagagctctttatgaagtttaaacaaaatcagagaaataaagagatgtgggaaagaaagaaaaaaaagaaagtacattgaggacagtccaatctaactgtgaactcataagggacagccagtaaattcaaaacagcctactgttttttgattacttgtgctactctattaaaatagccacaaacacaaaactagtctacctctttctctccccattattggccctaacccaaaaatagtgggagtaaatgatttaataatttattttcatgctccattttgttcttaagttaaaattactgtggttggtgcccctcctttagcttctgctaaagactttacataatgaaagctcatgaagtgtctggattactaacagttacttatccaaaaagatgagacatggttcattgatttgattcaattagttctctcttgaagatatttttctcctccctctgtgaagaaacatttctttctgtgtcatacaagacgagtcatttttgtagttttaattccctcttgagtcctacaataatactaaaatactca

SEQ ID NO: 1860 - DNA, 5814 bp, Homo sapiens
ggaacactttccctttttaagggtctgttcttcatgtctcaatgcctctgatctagtgaacacaactgtcctgaaactgaaagaacctgctaaatttcgagtttctggttaggtggctagaataggtttataagacttccttacttacctatgactgctgaagtttgaattcttagcagtatgattccttttcttgtaagctgagcagcttaggaaagattggccatgttgctgtgcaaaaagaggtaaacttaatttatactcaaagcatgcttgaatttggaactagggcttccactcttccaaagctggactgtcactacctcaggcatgtgtcccaaagggctcatgtctctgttgtactcaaagttcaaatggagcccagcaagccagatctcctttacttctaggttccctcaacagtttctcctctgctttagagactgccttgaaaatattcttgtcctgctgttgtgttttggctttggaatgatgtgatgcagctcaatgggtcctacccccaagttgatcagagtaagaaacagctgggaaagtcagtgcaaattcaagttcatcgtcctccttacagggattctgattcagagggctcaggtggggcctggaatgtgtttgttaacatgactcagatgtgcagtcagtttggggacccgctgataccatcgaccttatagtttatgggatgattctgttttgctgataaagaaactgaggcatagacagtctgtaacttgcccaagttccccttgctgtaagtcctggagccagatctcaggtggagcagcctcttccccatccccttcccacattttccaattcagctgggtcaattctttccaagtacgtgtttctctcccctatacctcatttctgaaaaaaggagaactggaatttaacttctttcatctaatacatttcctcacaacatgctgccagcatcatattctggcctcttactattaaagtgagatgccttttttttttttttttttttttttgagacagggtcttgttctgtcacccaggctggagtgcagtggtgattatagatcactgcaaccttgaactcctaggctcaagtgatcctcttgcctcagctttccaagtagttggaactctaggcacacatcaccatttctggctaattttttatttttcatggagacaaggtcttgctatgttgctcaggctggttttgaacttctggcctcaagcgatcctcccacctaggcctccaaaagtgctgggattacaggagtaaaccactgagcctggccctgaaatgcttttttttttttttttttttttttaatgaaaatacaaggcatggagatgtggaaagacaccttgctttattactgttattattagttccatagtataattcatatatcacaaaaatcaccatttttaagcatatatttcagtgtcttttaccatattccaaaagttctgcaaccatcaccactacctaattccagaatattttcataatgccaaaaagcatgcctgtacctatgggcagtcactctccaattccccacttcttgcagtctctgacaaccactaatctactttctctatatatagatgtacttgttctgggcacttaattcaacaaatggtcctgggacaactaaatatccacatgtaaaagaatcaagttagactccctccttgcacataaaaattaactcaaaatggatcagagacctaaaggtaggtggtaaaattataaatcacttagaagtagtaaatctttgtaatgtgggataagcaaagttttcacaaatatgactgaaagcacaagcaacaaaagaaaaaataaattgtattccatcaagttaaaaacatttgggctgaaaagtatatcatcaagaatgtgaaaagacagtacatagaatgacagaaaatatctgcaagtcatattatctgataagagacttgtatttaggatatatttttttaaaactattacagttcaatattaaaaagataaaccaattataaagtaggtaaaggatctgaacagacattctccaaagaagatacataatgactaataagtatatgaaaagatgttgaaaatcatcaaccatcagggaaatgtaaatcaaaaccacaatgagataaacacttcacattacagatgaatataataaaaaagacagacaataacaactgttgatgaggatgtggataaactggaattctcatacactgctggttggaatgtaaaataatgtacccacttcagaacagtctgacagttcctgaaaaggttaaacagcattaccatctgacgcagcaattctgctcctaggtatatatccaagaaatatgaagataaatgtctaccaaaaaattatacaagaatgttcataacagaattattgataatactcaaaaagtagaagcaactcaaatgtcaatcaactgatgatggataaataaaatgataaaatgtggtaaatccatatgataaaatattattcagccataaaaaggcacagagtactgataaatgctaccacatcaatgaactttgaaaacctcatgctaagtgaaagaagctgtcataaattactacatgctgcatgtttccatttgtatgaaatgtccagaagaggcaaataaagacagaaagtagactagtagttgcctagggctgggagggagttaggaggaatggagagtaattgataatgggtaaagggtttcttctgatgtataaaaatattctagaattgactgtggtgatggttactcctatctattaaaattactgaattgtgtacttttttaagaagtaaattgtatggtatataaattatatctcaaagctattgtattaagggaaaaagcactaaacacagtgccttacacatattagctaatattattatttgtcagtggtattatagcatttgttagagattgtctgctctaatccttttatgttacagatgaggaagttgagagccacatggctgacttgaccaagattaaacggctagtaagtaggaataagtactgaaacagaaactttacccaattgcagtccatatgttttctgggatcccggagttccctttcaacaatgtaaaatacaaacttaggtcaaaagttcccatgtctgagaaaactcaagccaaatcagttctcctccaaagttgacaggatttatgctttaaaaatagagatacagaattctctttggaaagatctaccaaattcctgtaagaaacagtctacccaaagtaggggaaaggctatatgaaaagttacaaggcacttcttaaaaatatatcttaggtttttagggaaaggtaaacagacaagtttccagacccgtgggtggaatggatgtagcagattcactgagaggctcacagcgccgtactaaagggagtctactgcttaaagccaattcacatccttaaaaggtcaaatggagagaaattaaacttgggagaagcattttaagactgtgctgttacaaaacctcgggccacttaactgattaatcatggcaatgagggcagggaccagaaaagagtctttagaacctgtcatccccacacagaagagcaactttcagggaaacacccttatctttccattttcagaccccgggaggtgtgagggtggaaaggctaggtagagaagagagcagaaaggagatgagatgacacaaccaggattctccgaagctgggcttgaagtcctcaagaaaaactcccatgaacaaggaaggaagagtgaagaaaaaaacagggatacctggaactggacaaaagtaaaaagatagaaggatactttttttcccccagaagaagtctgtcacaaaagcaaacctgcaaatatacgatcagtataacacccaagaaaatgacacatgcggccaggcatggtggctcatgcctggaatcccagcactttgagaagccgaggcaggtggatcacctgagatcaggagttcgaggccaacctgaccaacatggtgaaaccccatctttactaaaaatacaaaaattagctgagcatggtggcaggcacctgtagtcccagctacttggaaggctgagacatgagaatagcttgaacccgggaggtggaggttgcagtgagccgagatagcaccattgcactccagcctgggagaaagagcgatgctccgtctcaaaaaaaaaaaaaaaaaaaaaaaagaaaagaaaagaaaatgacacatgcccccaagtgtgagaatgcaagagggaatccctgacctatccctatccaaccagttttcttggcacacaccttccattctctgaatgagcccagattaactcactgacccctgtgccacgtatctcccactccatcacccgcccaggctcactgcttccacttgcgtcccttcatatctccctactgacctccacttttttctaactttgtcaccaaagaagtcacagaaataaataggaggattcaaaaagaataatttcagtacatttaaaaaattgtagaatataggattctcatctatgtttatcacgttcattcatttttcaaattttcattgtggcaccattttatgacaggcactatgctggggatgctggcgactagggtagggagttaaaatgagagtgtctacttggaaagatgaacagataaataatcaccgtggtaagtgctgtgctagagatatgcagatgtcaaaagaccttagaaggtctacaatccacttggagggtagggaatatagaaggcatttcagtgaaatagggtgcctttgacaaatcattaagaatgagttctacattaaaaaggggaagagagggtgatagctgaggaggcagcataggcaagaacatccagcatgaaagaacagtgaaggacatcaggaacatctttcaggaacatcaggtaaaacagacttagggcccaagtcaaaggagctaaaataatacaccctggaaagtggtatgatcatttctgcatctgctccagagaaacctgccaaaatatgattagcataatacccaagagaacatcacattccccatgtgtgaaaatgcaagagggagttatttctaatagttcataagctcagcaacaacagagtagacacaaaagccacagaatgtgcttaggctttactttaatgatatagggatatcacatatcatcagcctgtggagtacagaggtagtttacaaaggataaaccttcattgtttggaaaggaaagatcagagagctctttatgaagtttaaacaaaatcagagaaataaagagatgtgggaaagaaagaaaaaaaagaaagtacattgaggacagtccaatctaactgtgaactcataagggacagccagtaaattcaaaacagcctactgttttttgattacttgtgctactctattaaaatagccacaaacacaaaactagtctacctctttctctccccattattggccctaacccaaaaatagtgggagtaaatgatttaataatttattttcatgctccattttgttcttaagttaaaattactgtggttggtgcccctcctttagcttctgctaaagactttacataatgaaagctcatgaagtgtctggattactaacagttacttatccaaaaagatgagacatggttcattgatttgattctattagttctctcttgaagatatttttctcctccctctgtgaagaaacatttctttctgtgtcatacaagacgcgtcatttttgtagttttaattccctcttgagtcctacagtaatactaaaatactca

SEQ ID NO: 1861 - DNA, 538 bp, Homo sapiens
ttgaattattattattattattattatactttaagttctagggtacacgtgcacaacatgcaggtttgttacatatgtatatatgtgccatgttggtgtgctgcacccattaactcgtcatttacattaggtacatctcctaatgctatccctcccccgtcccaccaccccacgacaggccccggtttgtgatgttccccttcctgtgtccaagtgttctcattgttcaattcccacctatgagtgagaacatgcggtgtttggttttttgtccttgcaatagtttgctgagaatgatggtttccagcttcatccatgtccctacaaaggacatgaactcatccttttttatggctgaatagtattccatggtgtatatgtgccacattttcttaatccagtctatcactgatggacatttgggttggttccaagtctttgctattgtgaatagtgccgcaagaaacatacgtgtgcatgtgtctttatagcagcacgatttataattctttgggtatatacccagtaatgggatgcc

SEQ ID NO: 1862 - DNA, 2256 bp, Homo sapiens
tgcaatcagattcacttcacttttattatgaacaaacacaatctcagattagtacaattagcttcagagttgatattaatagaaattattccaaaattattcttgtcacaagtaactactatatcccacataaaaagggaaaaaatcccacccaatcacagaaaaggcatcctctgtatgtttccgtggcaatgcgttgtttatgtattctcaaattttgtctggctagttatccaccgcttctccaatggattcattcagtttcttggagaaccatatagactaatgacagcatctgggacacacggacgtatcaagttcatggtggacattcctattataaaaaatactcaggtcttgagaattcctgtgctgaaggatcccaaaatgctttctaaaaagcattagtcatgcctcaaaactgccctttgaggtaggtcagtattattatccccattttaacagaaggaaaactgaggcaccttatagttaagtgacttgcccaggggtcacacagcaagtcagtggcacagtggttggagaggccctggccttgaccacctgcataacatggaccacctcgcttttataacctttcatgatgacctatttgagctacacttacagagaatacaccctagatactagcaaaccaaggagaaaattttccattttaaatgctacaaccatcttttaacccaaaaaaaaaaaaaaacttataaatcaaatacattcaaattatttccaccctccatcaaatgtgggcacttaagaaaacgcagccctaacaaaagtttccagaatgaagcccagaagggaatcctgcaaatcgtgatactgataatcctccactcaggcccctttttctaccagccacttcagtagggtctcaggtgcaaagggattctgcagagggagtgagggcaggctcatatgcaacactgtgattagaaaagatgtaaggcacctgagctaagttgtcagcacaccccccaaagcaaggactgttagaaatccggactcttgatcagatctgagtttatcattaatgtgtcacttgaattgagctttagaatcttgaaaatcgtgttccttactcagcagacacactcccacccacacccacagccacacatacattggggccctcagcctgaggtgccatccagccttatgtagggtcatggtacagatcagatccatggcacacgattacaataggaagaagtgaaagttgtttttattgtttatatattatcaagcaggcatctgatgacctgtggaattagaaataccagcagacatttccaaggggtaggtgcacaggtcaacagaactaaactacagtgatcttcccttagatccttttctactgaggtgaatagctcaaaagacaaggatgcctttagtccaggctaacccctgtagcctctacgcaattaacacagaagaaaggccttcctcccttccagcactggggctcaacagtggactgagtgtttggtagtgtacatttccaatcttaatagagcaaagccagacttctggtttgatgactgagctacagggacaggagtggtccaaggttctcaaattctgtttttgtttttttccagacttctatactattgtctgccctaggctgtagggaatgctggttagtttgctgaacagacactgtgttcagcagggtttgtggtatctcaaatcccaggtctcaagccaaagctttgcaagttcacactgactccagggaacagggcctcctttcgaggtgaggcacttggcttcttgccattgcttcttcccagtgagaactgtttcctcctacttctacaagcattgcactgccagctgagagcactgactcaggcggggcaccctcaccaagtaagcagggggcattcagcatgccctctggttctgacccagagagaggggactgaaaataaaccctcttttgctctgtggctggcccactggctcaacgtgagcgcttggcttggctgtgcctcatgagagagggagggagagagaggctttctgggccagagatgtttctgggagggtttgccagccttgtcttgagccatcagtgtggcaggggagcacaggggtgtaggtggagacactgcgcaggccacgtgaaagtggcagctagctcgactttccaaagagaagcagtggttcagtgaccgtgagcattctgtgaacaggaggcagctgcctggacagcaagtcgtcactgcctctgaa

SEQ ID NO: 1863 - DNA, 994 bp, Homo sapiens
tgcaatcagattcacttcacttttattatgaacaaacacaatctcagattagtacaattagcttcagagttgatattaatagaaattattccaaaattattcttgtcacaagtaactactatatcccacataaaaagggaaaaaatcccacccaatcacagaaaaggcatcctctgtatgtttccgtggcaatgcgttgtttatgtattctcaaattttgtctggctagttatccaccgcttctccaatggattcattcagtttcttggagaaccatatagactaatgacagcatctgggacacacggacgtatcaagttcatggtggacattcctattataaaaaatactcaggtcttgagaattcctgtgctgaaggatcccaaaatgctttctaaaaagcattagtcatgcctcaaaactgccctttgaggtaggtcagtattattatccccattttaacagaaggaaaactgaggcaccttatagttaagtgacttgcccagggtcacacagcaagtcagtggcacagtggttggagaggccctggccttgaccaccagcataacatggccacctcgcttttttaacctttcatgatgacctatttgagctacacttacagagaatacacccaagatactagcaaaccaaggagaaaattttccattttaaatgctacaaccatcttttaacccaaaaaaaaaaaaaaaacttataaatcaaatacattcaaattatttccaccctccatcaaatgtgggcacttaagaaaagcagccctaacaaaagtttccagaatgaagcccagaagggaatcctgcaaatcgtgatactgataatcctccactcaggcccctttttctaccagccacttcagtagggtctcaggtgcaaagggattctgcagagggagtgagggcaggctcatatgcaacactgtgattagaaaagatgtaaggcacctgagctaagttgtcagcacaccccccaa

SEQ ID NO: 1864 - DNA, 17707 bp, Homo sapiens
tgcaatcagattcacttcacttttattatgaacaaacacaatctcagattagtacaattagcttcagagttgatattaatagaaattattccaaaattattcttgtcacaagtaactactatatcccacataaaaagggaaaaaatcccacccaatcacagaaaaggcatcctctgtatgtttccgtggcaatgcgttgtttatgtattctcaaattttgtctggctagttatccaccgcttctccaatggattcattcagtttcttggagaaccatatagactaatgacagcatctgggacacacggacgtatcaagttcatggtggacattcctattataaaaaatactcaggtcttgagaattcctgtgctgaaggatcccaaaatgctttctaaaaagcattagtcatgcctcaaaactgccctttgaggtaggtcagtattattatccccattttaacagaaggaaaactgaggcaccttatagttaagtgacttgcccagggtcacacagcaagtcagtggcacagtggttggagaggccctggccttaaccaccagcataacatggccacctcgcttttttaacctttcatgatgacctatttgagctacacttacagagaatacacccaagatactagcaaaccaaggagaaaattttccattttaaatgctacaaccatcttttaacccaaaaaaaaaaaaaaaacttataaatcaaatacattcaaattatttccaccctccatcaaatgtgggcacttaagaaaagcagccctaacaaaagtttccagaatgaagcccagaagggaatcctgcaaatcgtgatactgataatcctccactcaggcccctttttctaccagccacttcagtagggtctcaggtgcaaagggattctgcagagggagtgagggcaggctcatatgcaacactgtgattagaaaagatgtaaggcacctgagctaagttgtcagcacaccccccaaagcaaggactgttagaaatccggactcttgatcagatctgagtttatcattaatgtgtcacttgaattgagctttagaatcttgaaaatcgtgttccttactcagcagacacactcccacccacacccacagccacacatacattggggccctcagcctgaggtgccatccagccttatgtagggtcatggtacagatcagatccatggcacacgattacaataggaagaagtgaaagttgtttttattgtttatatattatcaagcaggcatctgatgacctgtggaattagaaataccagcagacatttccaaggggtaggtgcacaggtcaacagaactaaactacagtgatcttcccttagatccttttctactgaggtgaatagctcaaaagacaaggatgcctttagtccaggctaacccctgtagcctctacgcaattaacacagaagaaaggccttcctcccttccagcactggggctcaacagtggactgagtgtttggtagtgtacatttccaatcttaatagagcaaagccagacttctgctttgatgactgagctacagggacaggagtggtccaaggttctcaaattctgtttttgtttttttccagacttctatactattgtctgccctaggctgtagggaatgctggttagtttgctgaacagacactgtgttcagcagggtttgtggtatctcaaatcccaggtctcagccaaagctttgcagttcaccctgactccagggaacagggcctcctttcgaggtgaggcacttgggttcttgcccttgcttcttcccagtgagaactgtttcctcctacttctacaagcattgcactgccagctgagagcactgactcaggcggggcaccctcaccaagtaagcagggggcattcagcatgccctctggttctgacccagagagaggggactgaaaataaaccctcttttgctctgtggctggcccactggctcaacatgagcgcttggcttggctgtgcctcatgagagagggagggagagagaggctttctgggccagagatgtttctgggagggtttgccagccttgtcttgagccatcagtgtggcaggggagcacaggggtgtaggtggagacactgcggaggccacgtgaaagtggcagctagctctactttcaaaagagaagcagtggttcagtgaccctgagcattctgtgtgcaggagggagctgcctggacagcaagtcatcactgcctctgaatacacacaaaggaggctgcctgtccagggaaagaagaaaacgttcagggaagagaaagatctggtcaaagaaaagggacagacagggtagagccaggaatcaagaatcagggtagtgaagagattcctaaccctgccccccaggcagttgtatactttaggctagatgttaacagagacccccttctcctcaaaaaaaaatgagtgaaggggcacaacactgtggagagaagccttctagtttttactcatttcaaggagaaactggaactaattaatgaatggacctaatatctagtttattttattaagactcccaataactcactcagtaaccttctcaagcccctggcaacgtgttctcagatcccttcctatgtgaagttcgctcttagaagctgcctatagatcctgtccctcagcctctccatctcatgtccagcagtggagaggaaattggcatcccaactaattcctcctctccttcagagttttttccaaacatccctctttggaagggaaatactctaatagtttaacgttctaagcaatgtatatatgtatatatattttatttttgacccgacttcacctccttaaatccttccctttttttggatgtttggaaatgccacagccatcttattactatgaggggaagaaccaatatcctgaagatggcagagcagaaagaggaaagaactgtaatgagcagctcatggaatactcaaaattctatgagctgctgtttttaccaattctggaaacacccaacttcaagacttcttgatatatgaactaagaaatctccttgttattaaagaaaaaaagaaaagaaaacccttccccagcagagaccacttttactacaaacttaaaatgtcttttctttatcctcggcctcaactatatgttgcggcattgaattagcattgccaaacaccgcagccactttttaccccgagccaggagagaaaggaagcatgctatgtggtggggcttgaagtcctcattaggtaggcagctgtatgtctgatcatggcgagaggttcctcttgcttcgcttccctcatccttacattcatacatgctaactctctcccccgacaatttacctgctttagaagctttgtgtcaaatgaagttgcttttccattccatctagcaaaagcctgggctgaagataatcaacaggggactacccagaagattctgttttatctctagctcaagccacctacttcaaagctcacaacagctcaaggaaagagagttatctggagcaaagaccattcgttttaggctacagaaaggttgtctaggctttggaagctggacactgagcaaagactgaccagctgcttgcctgggagccaataagggaaaggagggcgatagcaataaagtgaaaaggaggacaatgggcctagaagagagagaggataagagaagaaataatatcagcttagcatcataaaggcagagttgttggctttcaatacttttgaattttaaaagaatactgtactggaatgggttaacatcatcatctttagcatcctggtagcattattcagtagttaataaacagacattaaaacctctgcctggctggtttttgaaaaaggaacctgagggaccccaaactcagccactcttgtagtttccatctccggttcttttaatcctggccaagatggcggccttggagactttcttccggtcataggccagaccgagggcggccatgcaatcaatgaagaatgtggtgaagttgatgtgccagcggtactcactggcagagtagtcatagggaaaggagtggtggtagttgtggaagccctcacctgaaacaaaagcgagaagttatggagtgacggtgcattgaggttttcttgatttgtgcacaccagttagctagcagggtacctcacacctgggagaaactcgctattgttgaatggatgaattcagtctcttttaatatgaaccaaacagatcccctcagaggcatctttacttttattattttactttttttgtagagacggggtcttgccatgttgcaagcaaccctcccacgttgaccacccaaagtgctaggattacagtcatgagtcactgcgcccagccagtcaaaggcatcttaaggagtgattggagaccctggtcacccgtggctgtctgggagccttgtgggaggagaactgacagtttctcagaggataaaatgactagagagaagctcctacttttgggaatgggtatcaggttggaaaattccaaattcactcttggccctgccctcaaggctctgtgtgcatgtgcatgtgcacgtccttgcagaatgaagcactctggctatgactcttaaaaaaatgagtaaagaagcacacctttccccaccacactggaaccacctctaggggtgggaggttccaaaagagtgggccctgcagccaaagatcagaagaaaggccagcccaggggctggaatgtcctcagccactgcagttcccaggggctgctccaacttttttgagctttgaccctggtgtgggggaggtgctgataaaacagaagctctctgaggaagaaaaataccctgtaacctctgagattttgaggactcttgggatgaacatttcactttgctggagggaggaaaacaaacaaattctggattcacagcaatttctctaacgtgtaaagctttggaaactcgacagatagagagtttgccaacgcttggcaggactcttctttctgaaccacagccaaaaataatactgaccctaatcaggcatggataaagaatagctactaagagctaatatttggctctttgtagataacagtaccctcagacagaccagtcatgacattaatcagaagcaaggcaaggaagtcctgcaaagtaaatgacatcatctagggcatttcaaggtatgtcctctctctgtgacacctgatgatctgcagtgtgaactggggaggaggggggtagaatgccaggaataaaggtactgaggattattaatgtccattaatggttttgcagctgggctgtgtgtaagcactagccaggcctttggttaccagatttaaaatggaatcagatgcacacagagacaagggaggaaaaaaaaagaagagggtcaacgggtagaaagaagacaggactttgcaactggggcagcaagagacagcccaagaaaggctcaagggagaaggttaatttggcagagaagatgagcatgtgacagtgggggaggtaattcaagaaacaaaaagattagggtggcaggaaacagagctggaggagaacaaagggtgaggtgataagggaggaaagcagcaggcaaggaggagtgaatgataacaacaacaggtcagatattggcagccactttgaactcatggccacccagaggctggaggtggggaaggtcattatagatccatttgcgatacaggaaacatctcatgccagaaactccattcctatgataatctcagatttatacagtgtatatgatttattttaatcatgggttaaagtaagaataggcacaatggtaagaaggtgcctgaaaagagatatgtgaaagttaaaaagagagaaaaaaaatgcttttatttttattatatatttttgagatggagtctctgtcacccaggctggagtgcagtggcacaatctcggctcattgcaacctctgcctcccgggttcaagcgattcttctgcctcagcctcctgagtagctgggactacaggcacgtgccaccatgcctggctaagttttttggacttttttttttttttttttttaagtagagacagaggttcaccatattggcctggctgatctctaactcctgacctcaagtgaaccacccactttggcttcccaaagtgctgggattacaggtgtgagccaccacgcctagacaaataaatctttttttttttttttttttgagacggagtctcgctctgtcgcccaggccggactgcggactgcagtggcggaatctcggctcactgcaagctccgcttcccgggttcacgccattctcctgcctcagcctcccaagtagctgggactacaggcgcccgccactgcgcctggctaatttttttgtatttttagtagagacggggtttcaccttgttagccaggatggtctcgatctcctgacctcatgatccacccgcctcggcctcccaaagtgctgggattacaggcaataaatccttttaataaacatagtaggccaggcgcagtggctcacggctattataattccagcactttgggaggccaaggcaggaagatcacttgagctcaggagttcgagaccagcctgtgcaacatggcaaaaccatgtctctacaaaaaaatagaaaaattagccaagcatggtggcatgcacctgtaatcccagttacttgggaggctgaaccccgaggatcgcttgagcccaggaggtcatagctgcagtgagctgtgatcacaccactgcactgaaacctgggcaacagagtgagactgtctcaacaacaatttaaaagataataaagatggttaaggttgagaatataaaggaagatttttaaagagaaaaagaaaatgagtgttaggcaatgacctgcctaaatgtgtggagtagtgtggttgtctagatattattgaatgaccaatagcaccaattactggaaagaagaggtcgccagatctatttaaggaaaattcattcagggccttggtgaaagtctatattcagttggaaagagggacagagaaaaaaatgtagatactttgggaggctgaggcaggaggatcacttcagcccagggttcaagaccagcctgggcaccatggtgagaccctgtctcattagaaaagaaaggaaaagaaaagaaaagaaagaaaatgaaaggaaagaaaagagaaaagataagatcaacattagagaattgagcaggaacttgtgatcacactgctttattgggagattcctgaaggcatgttgggggaagggatgttcctagcccagaatagaagtagaagagagaaaaatagaggacaagaggagacaagagggtaggtggtagtaaagggccaccagcagttattttgatgcccttcataatggcatcaccaaacagtaaggcacggcacactcttaaagcaaggcatatctgagtagagtggaaagataaaaaatactttgtgtgcatacttgaagttcataaaacaccaggcttactggccactcagatgatcccattgttctatttatgcattccttgcctcaagcaagactgcagtccagcccagagttgatgaaagaaaggaaaactctaaggtgctcatcatgtatggcatttggttttcttttttgtttgtttgttttgctttttaatagaaacagggtttcaccgtgttggccagactggtctcaaactcctgacctcaggtgacctgcccgcctcagcctcccaaagtgctgggattacaggcatgagccgccgggcccggagcatacatggcatttggaaattgttttagaacctggaatcaaaatcagtgtttttttgtgttttgtttcttatcctttcatttttacataaaacatgttgcctgactctcaaaagcgttttccagtatactgccccctaattttatagtggaaaaactgagatacaaagtagccataaaaaacagatttatctagtttttctggctcctagcctaatcccctaatcagcagaccactggatgtagtcttacttggacagctgacttacccacagctccaagtgaaaccaggatattctcccgggggctaatgttcttgtcataaggacgatatccgaagaggtgggcagcactgttcaccagccaggtggcattaagcaccacagcatatcgcaagaaagtggcaacgaacacactgttttgaaaagtttcaccccagaaataccagggcacaagcgtgggcaggatgaagcacatcatcagcaagccaggtttgtagtacctacattgacagaccagacaccaggtcaatggagggggactccacacctacatggatcttccacactaattgggaggggatgggctgtctttcttccatgttgaattgcttgtctgactctaagttcattgttttatttatttttgtttgttttttttgacagggtctcactctgttgccaaggctggagtgcagtggcgtgaccttagttcaccacagccttgaactcctgggccaagagatcctcccaccccagcctcctgagtagctgggaccacaggcatgaaccatcgtgcccatttagtttttaattttttgtggagatgaggtctcactatgttgcccatgctggtctcgaatgcctgaactttccagcaatcctcccgcctcagcctcccaaagtgctgggattacgggcatgagccaccatgcccggccatcgctgactttttactagagcataataccacattggtaagataggtgaggtccaaactacaaactaatgaacagacgtctctccatccttggctggttttcccatctgcctttgggcttctttctctttctaatcagcactctttttcagtctgtgtttagtgtcatgcctccattttctgctagctactccctaattctttggtcttcttttccctcagagacccattgagtgtccttgatcacctgcagctctctgtccctcaggaagccctttctcagtcttcattctcaatgtagaccaggccattgacattccaagggcactgattccctacattccttcagcagtcaagtctttgacttttacatcactgacattccctgcacccaactcttttctccatttctgccactgcttcgctagcaggggtcctcattacctaacttatgtccctacctctcactttggctcagtggtttcttacacttgttctaaaagcagccttcctaaagcacgtccgtaactatgccacattgcagttcaaaagatgtaatggcttcctattgcttattgaattaagtcctaagtctgcttttaggactcgacaagaatggcattagtctctccagtcttacttcttcccataccctatacttcaagcaaaaggactctattgctggaacatgcttcgtgttttagctcattctgtttcttctgtttgcactgtctctccccacacatagttgtaaaaatttctatccgttggtggattccaacactatttatttcatatcacttccttggtgttgcccattgagcaatctccctcccctttgtacctctcatagtacagaaaatattctgccttatgccatggttatctggatacttggcttatctctccaccccgataggctacaaactttttgaaggtaagaactaagctaccggcctgggcaatatagtgagtgagaccttgtccccacaaaaaattagccaggcatggcggtgtgtgcctgtagtcccagatactcaggaggttgaggtagaaggattgcttgagcctgggaagtcaaggctgcagtgagccatgattgtgccactgcactccagcctgggcaagagagaaagactgttgaaacacaaacacaaaaacaaacaaacaaacctaggcaactaggctataatcatctttgaatctatgactgtcctaggacaataaacatctcttgaatgtaatgggtttaattaagatagtcagagagaaagaaatggagcaatagtctatggctacgggcccgtgggatgttaaaaattgggattttaaattaagattgtgaacatgcaaacccagcaaatttctcagcttatattttgaaagtctcaggagaaaaaatggggtccctaatgaccaggtgccagggccatatccccacctccatcagggcttcactcacctcctctggaacatcaccagtttctcagcttctaggtcagacaagtctagcgtactccccttctctttgacagctgggtgtttgcgcacaagcagccaacccacgtgagagaagaaaaagccacgtcgggaattatgaggatcagcatgtgtttctgaaaacttgtggtgggcacggtggtcacgagcccattcatagacatcattctggggagagagagaagaggaatgtaaggcttgaggatagacaccctattaggagaatcccaatggacaggtatcaagagcccaaggcgctcagcccaacctcacaaaatacccaggaatctgggctccaaaggagtcatggagttgcctcccttcttctcccaacttgccactgaagcttaagtagaaaaaagcaacttaaagtcccaggaccatagcaatagaactgctgtttcttgaaagttatatggtgggtggaacggaggtaaatcatacagagctcagagagtttcaagaagtgagaacattgcaattctttaagcaaggaatgttggaaaagatcctcatggggtacctaatccctaggcatggggaacatgaggcaggcagccttgtgtcctagggtctcaatcagtagataagctgcagctgcagggtgcaccattctggtgccttgcaaaagagctcatacaacccaataacaaggccaggcatgcaactcgtgatcatgactgcattttcaaacgacctctgggcttcttcatgactttttccatcccttaaagaatgtaccaatatctctcttccttccttttgctccacaggacaactttggaagccttcaaggtataagctgctatggcagagatgatcatgcaaatgtggcaagttcttgggatattgccaccactaagttggtttcctttcttcctcttgctccaagctaagccaaacgccacatgctatcatttgcccattgctacagcttaatgactatgatgcattccctttccccatttcccttcattctgtctttgctataaacttttttttttttttttttgagatggagtcttgctgttgcccaggctggagtgcagtggcgcgatctcagctcactgcaagctctgcctcccaggttcacaccattctcctgcctcagcctcccacgtagctgggactacaggtgcccgccaccacgcctggctaattttttgtatttttagtagagacagagtttcactgtgttagccaggatgatcttgatctcctgaccttgtgatctgcccacctcggcctcccaaagttctgagattacaggcgtgagccaccgtgcccaggtttgttttttgccttaacaaacctcaatgttttacttagccaccatggcagcccaagaaagggccacaatgttgggctggtctatctaatctctctgtaacttggtttcctcatctgtaaaatggggataatagtacctatttcctaagatttttgtgaggactttatatcaaatgcttagaatagtgccaggctcatagtcagtgcaataaaagtgtttgctctcattatctcaaaataagagttcacgagtctgggaacatcaacttcaatcccactgtggtggagtcctaagttattcacttttgaaattttttttttaaagttggggtcttgtcacccaggctggagtgcagtggtgatatcatggctcactgcagcttcaaactcctgggctccagtgatcctcccagctctgcctccctaagatatttaccttaaatagtgaatttattgtccagtgtctgcccaggaatctaaggtcagtctctggcttatgtgccaaagccccttatgatgaagagccacaacggccagattgtgtgacaacacagggaccttaggatcaaaaatattcctacacatcaggagtattttccaattatcttccagttcccttttccaagactcagaagtctcttcatgctttatggacttaaggactgaactggaacttgaggtgactacaggagagaggaaagtgaaatggctgtcaggtgtggctcctctctggtgctgatccctcctttctgtccccggatcattaatagtgtggaggacaaacagctgagcagagacaacttcttacctggaatgccattgtgttggcaatgatcagaaagagccgtaggggcagccgagctttgtaagagcggtggctccacagacgatgagctcctgctgttatgcccagggcactgacaaaatagtagaatacccctgccaggagaagacagtgggggagtcaccaatcagtgtgagttccatctgggaaaggatgccagagacactctctggatgctagaaactgtcttcgtcaggctttgggtgagaactggctttaccatgaactctagggataaccacatcccttagattttaccacttgaaaaatatcaccccccaacctctcaacccaggaaaaaaagataagctaaagaatcccaggaactaaggagtcagaaaggcaggagagagaatagtgctcttaccactcattcttcatcttaaaggcattctcccagggcctagctatctcctttcacctctatctaggccttctctaaggttttaagggccacaaactactcctgcagagctcagaacccataagccagggtgttattaaaataacagcagagggccaggtgtagtatgaaccactttgtcatcccagcattttgggaggccaaggcaggaagatccccttgagcccaggagttcaagaccagctgggataacatagggagaccttgcctctacagataattttaaaaattagcttggcatggtggcacctgcctgtggtctcagctactcaagaggttgaggtgggaggatctcttgagctcaggaggtcgaggctgcggtgagccaagatcgcgccactgcactcaagccttatcaacacagcaagaccttatctcaaaaaataaaataacagccagtacaatctgggcactgaccaatttgagaagcccttagttgtaggggactcttagggcattcagactatggccatttatcaactggtacaaaaaagcatttaaatattcaagcagtcagtgtggccaaatcagggaaaaattagccctgtgcataaatccaatttgtacagtgtcttaagctttaccaaagatttcacgttccagctataccatccacctcccccaagatacatgcacaactcctctgtctcgcctttgccacatccctgtcagcccatactctcaccgggcaacgctctctagacaatggtgggatattcttcaagctgtcagtgaagcaccccaccattgtcttccctcaccttcctggaggcctgcaggctcaggaggtgccagatataatctctaactgggaagtgggctgctgggcgtccccatatcttcctctgttcagtagctctagcaggcagaagctgtggccttgatagaaactcttaacaatgtttcattcctagggaaacagctagaaacaatagatcctcagtggccacagaacttagttgcagttggagacaccacacattgtaacaaattgtcctgtgttcttttgcagccattgatagctgtttcctaaacaacctccttttccccccaaccctacctcctttcttctcttctattcctcctataagatctccaggagagccacagagccagtcagccccaacaagagctctctccacattccctcagagtggggactgaggccccaggtgatctgccctcaagccaagtggtgactgacatctccccagatacagtatctacctgcatcttactcgggaaaccatcagttgagccagagctctctctaatgagcaagggagcttctagggttgttatttgctgcaagaccctagggcagtgttgactcagaacgtatataagatcctatattaacagggaaattggggaaagaactcaggcactctggtgccttttctagaaacacctctaagcctatcaaatagaagggcttaaatcagttggagatttattccttctctcctccccaggggaggaaaatgtccagattgatggttaagcaacatctcattgctctggccttaagaaagagacttgaatggttttgcctctggctctcagtgttgccagaggcattctcctaagggcttctttgggagactccaaaatgaaagagatttaaggctctcaaaagtgctcagtcataagaaatgctggaatcacgaccagttgctaatttaacattgtccatagggattaaaacaagaaaggtgaagctcctaaattctgaaggtgggaagagaagatgtccaagttgagacctctgaccctcctcccctcaccctccttgtttctcaagacagaggagttctgatatccccacatcgacatggtcattctttcagctaagccatccaccaaagggcccagtaaaataagttaccatctagtctctgtgagccacatttatctgcccaagggcacagcacacacccatgggcaggtcaccaaaaaaatgtagcaggcacagccttcactttgggatggaattctgctccttgcagtagcaactgaggataaccaagcagaggcaatcgggtcaaactctgggcttcaggaaacctacagggggtgctgaggctggaaggagcttgcaggagagaaaactacttgtgaagactatcctcttggggagaaagggtggagagaggcatccacagactgcctggggaatgctatccctgctcctcatccctcagctgcaactgaagttctgctggatcctcagaggggctagacaacagatgtcgccctcccctcacaaatacaagagctcttcctggtatgcagatgaactgatctgcacctggcctgttctgtctctgcggctgtgacacatatgtaacccaaggaatgctaccttccccatcctaaaaaagtactgttgcccacaggtggtacctagaaaaactgagatcctgacaaaggggctcttctcagttgcatttcactgtagcacctggaggatttctggaaacaaaagctcaatgaaccagatctcaccatcttcagaagacctaagaggtcctgagggaaacagctaaaacttggcctaccagcccttctgcataactacccttcaagagcgagctgtcagaaagtttcccacaccagaagtcctggctcaccaccccttagagagtagcagtgcagggcccctggatctgcagagctccctgctttcccttcccaacttaggctcatagtgacagaggtgaaaaagcctgcaaagcgcatgtgtgtatccagggggcagggccatgccatcaggccacaccaacaggtccctgaaagagctgagctaagggcaggtcggggacaaactgggaactgtctccctcattacagcagcctcaagaccgggctctcttttctggcctggcctcgatgtccctggcaaggagggatgggtaggactggtgttggaaggtgcagaattcttggcacttcatggcatcagtaggggggcctgaagcaggctggacgggggatggaacatgaaacatatcttcagcctgatttcattctaagagcattttgttgactggtatgtgcagcacctggaatgtagagtaacagagcaacacacacctgtgtgacttgggttgcacgggagcttcatcttcctctgtaacgaagaagcctggtctggccaaggggtcaggtcaaaatagttttgtggataacaacctctcttttcctctctttccaatgagctctctcctccctttccaataaactctctccctgagtagtttcccttgtgctagcctatgattgctcaacacaaaccctagaaagccaatggtttagtaccatgttcccatgcctcccaggtagaggggtttgattcttttgtggctggcaggggtgggacaggcagccaagcaaatgactcaaacagaaaagctctttcagggaaagctgactctccagcacagcacacttcaaagcccacaagcacaaggttccaaagctctcaacccccagcattgacagtcctgcatctcagtacccccaggttcttcccagcccactaggcctgaagcaaccaaagagaaatgcctgagaaaaaccccaaccgggaggctgggaggggctggtgtcctctgtaagatcctaccttattaaaagagcagtgagtacctggaggactaggtcaggaggacagggaggctgcttaccccaaagccaggtgtagaacttgcaggtaggaatcaaagtgatcccatacagggctcccaagtgtagcagagacataaggatgatgtttctccagacatattcaaccttggggcttgggccttccttatccttgtaggtggggtcatatatatcatcttttatatcagggcgaatgtcgtcttccaagtagaggggcatcgtctccaacttatctcctccattctgcaggaccctggagggaggcgctgtaatggtggtggtggtggtataggagctagagatctggaagggggaggaagaggagagtcaggagaagagacacgtggaggcagctggggccactccgctctctaatcacgctgggggaagggtggacagtacggacccttccgcagcgccgtagttcactgagggtagggtgtatccgagacgcaacggagaaaagttccctgaaactgtacagatacattaggggcggagggcgagggggacgaggggcgcgaaacctatcgggaggcggcagtaggaaggagaagtaaagcactcacatccccacgaagacaaaggaaaacccgcataattcataaaagcaccagcacgaccggatttttctttaaagcttaagaaactaaagttggagactcaagtccccaaattacaatccacattcccaactcacggaaggcagcacaactcgaaaaagatgaccaagtcctccgcggagctctcccctctcttctgccaccaacccgtcccctggaagcccagcccgcgcctgcgacccggcggtacggggccaggctgggaaactcacatcgtcctgcagcaagtgggccggcatcttggctctcggatgccgggatcactttccagggggctgaggctccggagcggagttcggggtcgccggaggactgcggtttcgaagcccgccggtacgcgctgagccgcggcgccttgcacgctagctggttgtcggcgctagccgcggtgcgtggaggtccccgagccgggaatttaaaggctagagctggcaacgggtgaccgtgtccggtatttcctcagcccccttttatccgctgccaagcaggggcaaagtgcgaggagttgactggcgcgggcggtcccgcgtggaggtaagggcgggagggggaggagacagaggccgaggctcgcggcgaccgcagcagggcgccggggatgctgtcgacaccgacaccac

SEQ ID NO: 1865 - DNA, 17704 bp, Homo sapiens
tgcaatcagattcacttcacttttattatgaacaaacacaatctcagattagtacaattagcttcagagttgatattaatagaaattattccaaaattattcttgtcacaagtaactactatatcccacataaaaagggaaaaaatcccacccaatcacagaaaaggcatcctctgtatgtttccgtggcaatgcgttgtttatgtattctcaaattttgtctggctagttatccaccgcttctccaatggattcattcagtttcttggagaaccatatagactaatgacagcatctgggacacacggacgtatcaagttcatggtggacattcctattataaaaaatactcaggtcttgagaattcctgtgctgaaggatcccaaaatgctttctaaaaagcattagtcatgcctcaaaactgccctttgaggtaggtcagtattattatccccattttaacagaaggaaaactgaggcaccttatagttaagtgacttgcccagggtcacacagcaagtcagtggcacagtggttggagaggccctggccttaaccaccagcataacatggccacctcgcttttttaacctttcatgatgacctatttgagctacacttacagagaatacacccaagatactagcaaaccaaggagaaaattttccattttaaatgctacaaccatcttttaacccaaaaaaaaaaaaaaaacttataaatcaaatacattcaaattatttccaccctccatcaaatgtgggcacttaagaaaagcagccctaacaaaagtttccagaatgaagcccagaagggaatcctgcaaatcgtgatactgataatcctccactcaggcccctttttctaccagccacttcagtagggtctcaggtgcaaagggattctgcagagggagtgagggcaggctcatatgcaacactgtgattagaaaagatgtaaggcacctgagctaagttgtcagcacaccccccaaagcaaggactgttagaaatccggactcttgatcagatctgagtttatcattaatgtgtcacttgaattgagctttagaatcttgaaaatcgtgttccttactcagcagacacactcccacccacacccacagccacacatacattggggccctcagcctgaggtgccatccagccttatgtagggtcatggtacagatcagatccatggcacacgattacaataggaagaagtgaaagttgtttttattgtttatatattatcaagcaggcatctgatgacctgtggaattagaaataccagcagacatttccaaggggtaggtgcacaggtcaacagaactaaactacagtgatcttcccttagatccttttctactgaggtgaatagctcaaaagacaaggatgcctttagtccaggctaacccctgtagcctctacgcaattaacacagaagaaaggccttcctcccttccagcactggggctcaacagtggactgagtgtttggtagtgtacatttccaatcttaatagagcaaagccagacttctgctttgatgactgagctacagggacaggagtggtccaaggttctcaaattctgtttttgtttttttccagacttctatactattgtctgccctaggctgtagggaatgctggttagtttgctgaacagacactgtgttcagcagggtttgtggtatctcaaatcccaggtctcagccaaagctttgcagttcaccctgactccagggaacagggcctcctttcgaggtgaggcacttgggttcttgcccttgcttcttcccagtgagaactgtttcctcctacttctacaagcattgcactgccagctgagagcactgactcaggcggggcaccctcaccaagtaagcagggggcattcagcatgccctctggttctgacccagagagaggggactgaaaataaaccctcttttgctctgtggctggcccactggctcaacatgagcgcttggcttggctgtgcctcatgagagagggagggagagagaggctttctgggccagagatgtttctgggagggtttgccagccttgtcttgagccatcagtgtggcaggggagcacaggggtgtaggtggagacactgcggaggccacgtgaaagtggcagctagctctactttcaaaagagaagcagtggttcagtgaccctgagcattctgtgtgcaggagggagctgcctggacagcaagtcatcactgcctctgaatacacacaaaggaggctgcctgtccagggaaagaagaaaacgttcagggaagagaaagatctggtcaaagaaaagggacagacagggtagagccaggaatcaagaatcagggtagtgaagagattcctaaccctgccccccaggcagttgtatactttaggctagatgttaacagagacccccttctcctcaaaaaaaaatgagtgaaggggcacaacactgtggagagaagccttctagtttttactcatttcaaggagaaactggaactaattaatgaatggacctaatatctagtttattttattaagactcccaataactcactcagtaaccttctcaagcccctggcaacgtgttctcagatcccttcctatgtgaagttcgctcttagaagctgcctatagatcctgtccctcagcctctccatctcatgtccagcagtggagaggaaattggcatcccaactaattcctcctctccttcagagttttttccaaacatccctctttggaagggaaatactctaatagtttaacgttctaagcaatgtatatatgtatatatattttatttttgacccgacttcacctccttaaatccttccctttttttggatgtttggaaatgccacagccatcttattactatgaggggaagaaccaatatcctgaagatggcagagcagaaagaggaaagaactgtaatgagcagctcatggaatactcaaaattctatgagctgctgtttttaccaattctggaaacacccaacttcaagacttcttgatatatgaactaagaaatctccttgttattaaagaaaaaaagaaaagaaaacccttccccagcagagaccacttttactacaaacttaaaatgtcttttctttatcctcggcctcaactatatgttgcggcattgaattagcattgccaaacaccgcagccactttttaccccgagccaggagagaaaggaagcatgctatgtggtggggcttgaagtcctcattaggtaggcagctgtatgtctgatcatggcgagaggttcctcttgcttcgcttccctcatccttacattcatacatgctaactctctcccccgacaatttacctgctttagaagctttgtgtcaaatgaagttgcttttccattccatctagcaaaagcctgggctgaagataatcaacaggggactacccagaagattctgttttatctctagctcaagccacctacttcaaagctcacaacagctcaaggaaagagagttatctggagcaaagaccattcgttttaggctacagaaaggttgtctaggctttggaagctggacactgagcaaagactgaccagctgcttgcctgggaggcaataagggaaaggagggcgatagcaataaagtgaaaaggaggacaatgggcctagaagagagagaggataagagaagaaataatatcagcttagcatcataaaggcagagttgttggctttcaatacttttgaattttaaaagaatactgtactggaatgggttaacatcatcatctttagcatcctggtagcattattcagtagttaataaacagacattaaaacctctgcctggctggtttttgaaaaaggaacctgagggaccccaaactcagccactcttgtagtttccatctccggttcttttaatcctggccaagatggcggccttggagactttcttccggtcataggccagaccgagggcggccatgcaatcaatgaagaatgtggtgaagttgatgtgccagcggtactcactggcagagtagtcatagggaaaggagtggtggtagttgtggaagccctcacctgaaacaaaagcgagaagttatggagtgacggtgcattgaggttttcttgatttgtgcacaccagttagctagcagggtacctcacacctgggagaaactcgctattgttgaatggatgaattcagtctcttttaatatgaaccaaacagatcccctcagaggcatctttacttttattattttactttttttgtagagacggggtcttgccatgttgcaagcaaccctcccacgttgaccacccaaagtgctaggattacagtcatgagtcactgcgcccagccagtcaaaggcatcttaaggagtgattggagaccctggtcacccgtggctgtctgggagccttgtgggaggagaactgacagtttctcagaggataaaatgactagagagaagctcctacttttgggaatgggtatcaggttggaaaattccaaattcactcttggccctgccctcaaggctctgtgtgcatgtgcatgtgcacgtccttgcagaatgaagcactctggctatgactcttaaaaaaatgagtaaagaagcacacctttccccaccacactggaaccacctctaggggtgggaggttccaaaagagtgggccctgcagccaaagatcagaagaaaggccagcccaggggctggaatgtcctcagccactgcagttcccaggggctgctccaacttttttgagctttgaccctggtgtgggggaggtgctgataaaacagaagctctctgaggaagaaaaataccctgtaacctctgagattttgaggactcttgggatgaacatttcactttgctggagggaggaaaacaaacaaattctggattcacagcaatttctctaacgtgtaaagctttggaaactcgacagatagagagtttgccaacgcttggcaggactcttctttctgaaccacagccaaaaataatactgaccctaatcaggcatggataaagaatagctactaagagctaatatttggctctttgtagataacagtaccctcagacagaccagtcatgacattaatcagaagcaaggcaaggaagtcctgcaaagtaaatgacatcatctagggcatttcaaggtatgtcctctctctgtgacacctgatgatctgcagtgtgaactggggaggaggggggtagaatgccaggaataaaggtactgaggattattaatgtccattaatggttttgcagctgggctgtgtgtaagcactagccaggcctttggttaccagatttaaaatggaatcagatgccacagagacaagggaggaaaaaaaaagaagagggtcaacgggtagaaagaagacaggactttgcaactggggcagcaagagacagcccaagaaaggctcaagggagaaggttaatttggcagagaagatgagcatgtgacagtgggggaggtaattcaagaaacaaaaagattagggtggcaggaaacagagctggaggagaacaaagggtgaggtgataagggaggaaagcagcaggcaaggaggagtgaatgataacaacaacaggtcagatattggcagccactttgaactcatggccacccagaggctggaggtggggaaggtcattatagatccatttgcgatacaggaaacatctcatgccagaaactccattcctatgataatctcagatttatacagtgtatatgatttattttaatcatgggttaaagtaagaataggcacaatggtaagaaggtgcctgaaaagagatatgtgaaagttaaaaagagagaaaaaaaatgcttttatttttattatatatttttgagatggagtctctgtcacccaggctggagtgcagtggcacaatctcggctcattgcaacctctgcctcccgggttcaagcgattcttctgcctcagcctcctgagtagctgggactacaggcacgtgccaccatgcctggctaagttttttgtacttttttttttttttttttttaagtagagacagaggttcaccatattggcctggctgatctctaactcctgacctcaagtgaaccacccactttggcttcccaaagtgctgggattacaggtgtgagccaccacgcctagacaaataaatctttttttttttttttttttgagacggagtctcgctctgtcgcccaggccggactgcggactgcagtggcggaatctcggctcactgcaagctccgcttcccgggttcacgccattctcctgcctcagcctcccaagtagctgggactacaggcgcccgccactgcgcctggctaatttttttgtatttttagtagagacggggtttcaccttgttagccaggatggtctcgatctcctgacctcatgatccacccgcctcggcctcccaaagtgctgggattacaggcaataaatccttttaataaacatagtaggccaggcgcagtggctcacggctattataattccagcactttgggaggccaaggcaggaagatcacttgagctcaggagttcgagaccagcctgtgcaacatggcaaaaccatgtctctacaaaaaaatagaaaaattagccaagcatggtggcatgcacctgtaatcccagttacttgggaggctgaaccccgaggatcgcttgagcccaggaggtcatagctgcagtgagctgtgatcacaccactgcactgaaacctgggcaacagagtgagactgtctcaacaacaatttaaaagataataaagatggttaaggttgagaatataaaggaagatttttaaagagaaaaagaaaatgagtgttaggcaatgacctgcctaaatgtgtggagtagtgtggttgtctagatattattgaatgaccaatagcaccaattactggaaagaagaggtcgccagatctatttaaggaaaattcattcagggccttggtgaaagtctatattcagttggaaagagggacagagaaaaaaatgtagatactttgggaggctgaggcaggaggatcacttcagcccagggttcaagaccagcctgggcaccatggtgagaccctgtctcattagaaaagaaaggaaaagaaaagaaaagaaagaaaatgaaaggaaagaaaagagaaaagataagatcaacattagagaattgagcaggaacttgtgatcacactgctttattgggagattcctgaaggcatgttgggggaagggatgttcctagcccagaatagaagtagaagagagaaaaatagaggacaagaggagacaagagggtaggtggtagtaaagggccaccagcagttattttgatgcccttcataatggcatcaccaaacagtaaggcacggcacactcttaaagcaaggcatatctgagtagagtggaaagataaaaaatactttgtgtgcatacttgaagttcataaaacaccaggcttactggccactcagatgatcccattgttctatttatgcattccttgcctcaagcaagactgcagtccagcccagagttgatgaaagaaaggaaaactctaaggtgctcatcatgtatggcatttggttttcttttttgtttgtttgttttgctttttaatagaaacagggtttcaccgtgttggccagactggtctcaaactcctgacctcaggtgacctgcccgcctcagcctcccaaagtgctgggattacaggcatgagccgccgggcccggagcatacatggcatttggaaattgttttagaacctggaatcaaaatcagtgtttttttgtgttttgtttcttatcctttcatttttacataaaacatgttgcctgactctcaaaagcgttttccagtatactgccccctaattttatagtggaaaaactgagatacaaagtagccataaaaaacagatttatctagtttttctggctcctagcctaatcccctaatcagcagaccactggatgtagtcttacttggacagctgacttacccacagctccaagtgaaaccaggatattctcccgggggctaatgttcttgtcataaggacgatatccgaagaggtgggcagcactgttcaccagccaggtggcattaagcaccacagcatatcgcaagaaagtggcaacgaacacactgttttgaaaagtttcaccccagaaataccagggcacaagcgtgggcaggatgaagcacatcatcagcaagccaggtttgtagtacctacattgacagaccagacaccaggtcaatggagggggactccacacctacatggatcttccacactaattgggaggggatgggctgtctttcttccatgttgaattgcttgtctgactctaagttcattgttttatttatttttgtttgttttttttgacagggtctcactctgttgccaaggctggagtgcagtggcgtgaccttagttcaccacagccttgaactcctgggccaagagatcctcccaccccagcctcctgagtagctgggaccacaggcatgaaccatcgtgcccatttagtttttaattttttgtagagatgaggtctcactatgttgcccaggctggtctcgaatgcctgaactttccagcaatcctcccgcctcagcctcccaaagtgctgggattacgggcatgagccaccatgcccggccatcgctgactttttactagagcataataccacattggtaagataggtgaggtccaaactacaaactaatgaacagacgtctctccatccttggctggttttcccatctgcctttgggctcctttctctttctaatcagcactctttttcagtctgtgtttagtgtcatgcctccattttctgctagctactccctaattctttggtcttcttttccctcagagacccattgagtgtccttgatcacctgcagctctctgtccctcaggaagccctttctcagtcttcattctcaatgtagaccaggccattgacattccaagggcactgattccctacattccttcagcagtcaagtctttgacttttacatcactgacattccctgcacccaactcttttctccatttctgccactgcttcgctagcaggggtcctcattacctaacttatgtccctacctctcactttggctcagtggtttcttacacttgttctaaaagcagccttcctaaagcacgtccgtaactatgccacattgcagttcaaaagatgtaatggcttcctattgcttattgaattaagtcctaagtctgcttttaggactcgacaagaatggcattagtctctccagtcttacttcttcccataccctatacttcaagcaaaaggactctattgctggaacatgcttcgtgttttagctcattctgtttcttctgtttgcactgtctctccccacacatagttgtaaaaatttctatccgttggtggattccaacactatttatttcatatcacttccttggtgttgcccattgagcaatctccctcccctttgtacctctcatagtacagaaaatattctgccttatgccatggttatctggatacttggcttatctctccaccccgataggctacaaactttttgaaggtaagaactaagctaccggcctgggcaatatagtgagtgagaccttgtccccacaaaaaattagccaggcatggcggtgtgtgcctgtagtcccagatactcaggaggttgaggtagaaggattgcttgagcctgggaagtcaaggctgcagtgagccatgattgtgccactgcactccagcctgggcaagagagaaagactgttgaaacacaaacacaaaaacaaacaaacaaacctaggcaactaggctataatcatctttgaatctatgactgtcctaggacaataaacatctcttgaatgtaatgggtttaattaagatagtcagagagaaagaaatggagcatagtctatggctacgggcccgtgggatgttaaaaattgggattttaaattaagattgtgaacatgcaaaccagcaatttctcagcttatattttgaaagtctcaggagaaaaaatggggtccctaatgaccaggtgccagggccatatccccacctccatcagggcttcactcacctcctctggaacatcaccagtttctcagcttctaggtcagacaagtctagcgtactccccttctctttgacagctgggtgtttgcgcacaagcagccaacccacgtgagagaagaaaaagccacgtcgggaattatgaggatcagcatgtgtttctgaaaacttgtggtgggcacggtggtcacgagcccattcatagacatcattctggggagagagagaagaggaatgtaaggcttgaggatagacaccctattaggagaatcccaatggacaggtatcaagagcccaaggcgctcagcccaacctcacaaaatacccaggaatctgggctccaaaggagtcatggagttgcctcccttcttctcccaacttgccactgaagcttaagtagaaaaaagcaacttaaagtcccaggaccatagcaatagaactgctgtttcttgaaagttatatggtgggtggaacggaggtaaatcatacagagctcagagagtttcaagaagtgagaacattgcaattctttaagcaaggaatgttggaaaagatcctcatggggtacctaatccctaggcatggggaacatgaggcaggcagccttgtgtcctagggtctcaatcagtagataagctgcagctgcagggtgcaccattctggtgccttgcaaaagagctcatacaacccaataacaaggccaggcatgcaactcgtgatcatgactgcattttcaaacgacctctgggcttcttcatgactttttccatcccttaaagaatgtaccaatatctctcttccttccttttgctccacaggacaactttggaagccttcaaggtataagctgctatggcagagatgatcatgcaaatgtggcaagttcttgggatattgccaccactaagttggtttcctttcttcctcttgctccaagctaagccaaacgccacatgctatcatttgcccattgctacagcttaatgactatgatgcattccctttccccatttcccttcattctgtctttgctataaacttttttttttttttttttgagatggagtcttgctgttgcccaggctggagtgcagtggcgcgatctcagctcactgcaagctctgcctcccaggttcacaccattctcctgcctcagcctcccacgtagctgggactacaggtgcccgccaccacgcctggctaattttttgtatttttagtagagacagagtttcactgtgttagccaggatgatcttgatctcctgaccttgtgatctgcccacctcggcctcccaaagttctgagattacaggcgtgagccaccgtgcccaggtttgttttttgccttaacaaacctcaatgttttacttagccaccatggcagcccaagaaagggccacaatgttgggctggtctatctaatctctctgtaacttggtttcctcatctgtaaaatggggataatagtacctatttcctaagatttttgtgaggactttatatcaaatgcttagaatagtgccaggctcatagtcagtgcaataaaagtgtttgctctcattatctcaaaataagagttcacgagtctgggaacatcaacttcaatcccactgtggtggagtcctaagttattcacttttgaaattttttttttaaagttggggtcttgtcacccaggctggagtgcagtggtgatatcatggctcactgcagcttcaaactcctgggctccagtgatcctcccagctctgcctccctaagatatttaccttaaatagtgaatttattgtccagtgtctgcccaggaatctaaggtcagtctctggcttatgtgccaaagccccttatgatgaagagccacaacggccagattgtgtgacaacacagggaccttaggatcaaaaatattcctacacatcaggagtattttccaattatcttccagttcccttttccaagactcagaagtctcttcatgctttatggacttaaggactgaactggaacttgaggtgactacaggagagaggaaagtgaaatggctgtcaggtgtggctcctctctggtgctgatccctcctttctgtccccggatcattaatagtgtggaggacaaacagctgagcagagacaacttcttacctggaatgccattgtgttggcaatgatcagaaagagccgtaggggcagccgagctttgtaagagcggtggctccacagacgatgagctcctgctgttatgcccagggcactgacaaaatagtagaatacccctgccaggagaagacagtgggggagtcaccaatcagtgtgagttccatctgggaaaggatgccagagacactctctggatgctagaaactgtcttcgtcaggctttgggtgagaactggctttaccatgaactctagggataaccacatcccttagattttaccacttgaaaaatatcaccccccaacctctcaacccaggaaaaaaagataagctaaagaatcccaggaactaaggagtcagaaaggcaggagagagaatagtgctcttaccactcattcttcatcttaaaggcattctcccagggcctagctatctcctttcacctctatctaggccttctctaaggttttaagggccacaaactactcctgcagagctcagaacccataagccagggtgttattaaaataacagcagagggccaggtgtagtatgaaccactttgtcatcccagcattttgggaggccaaggcaggaagatccccttgagcccaggagttcaagaccagctgggataacatagggagaccttgcctctacagataattttaaaaattagcttggcatggtggcacctgcctgtggtctcagctactcaagaggttgaggtgggaggatctcttgagctcaggaggtcgaggctgcggtgagccaagatcgcgccactgcactcaagccttatcaacacagcaagaccttatctcaaaaaataaaataacagccagtacaatctgggcactgaccaatttgagaagcccttagttgtaggggactcttagggcattcagactatggccatttatcaactggtacaaaaaagcatttaaatattcaagcagtcagtgtggccaaatcagggaaaaattagccctgtgcataaatccaatttgtacagtgtcttaagctttaccaaagatttcacgttccagctataccatccacctcccccaagatacatgcacaactcctctgtctcgcctttgccacatccctgtcagcccatactctcaccgggcaacgctctctagacaatggtgggatattcttcaagctgtcagtgaagcaccccaccattgtcttccctcaccttcctggaggcctgcaggctcaggaggtgccagatataatctctaactgggaagtgggctgctgggcgtccccatatcttcctctgttcagtagctctagcaggcagaagctgtggccttgatagaaactcttaacaatgtttcattcctagggaaacagctagaaacaatagatcctcagtggccacagaacttagttgcagttggagacaccacacattgtaacaaattgtcctgtgttcttttgcagccattgatagctgtttcctaaacaacctccttttccccccaaccctacctcctttcttctcttctattcctcctataagatctccaggagagccacagagccagtcagccccaacaagagctctctccacattccctcagagtggggactgaggccccaggtgatctgccctcaagccaagtggtgactgacatctccccagatacagtatctacctgcatcttactcgggaaaccatcagttgagccagagctctctctaatgagcaagggagcttctagggttgttatttgctgcaagaccctagggcagtgttgactcagaacgtatataagatcctatattaacagggaaattggggaaagaactcaggcactctggtgccttttctagaaacacctctaagcctatcaaatagaagggcttaaatcagttggagatttattccttctctcctccccaggggaggaaaatgtccagattgatggttaagcaacatctcattgctctggccttaagaaagagacttgaatggttttgcctctggctctcagtgttgccagaggcattctcctaagggcttctttgggagactccaaaatgaaagagatttaaggctctcaaaagtgctcagtcataagaaatgctggaatcacgaccagttgctaatttaacattgtccatagggattaaaacaagaaaggtgaagctcctaaattctgaaggtgggaagagaagatgtccaagttgagacctctgaccctcctcccctcaccctccttgtttctcaagacagaggagttctgatatccccacatcgacatggtcattctttcagctaagccatccaccaaagggcccagtaaaataagttaccatctagtctctgtgagccacatttatctgcccaagggcacagcacacacccatgggcaggtcaccaaaaaaatgtagcaggcacagccttcactttgggatggaattctgctccttgcagtagcaactgaggataaccaagcagaggcaatcgggtcaaactctgggcttcaggaaacctacagggggtgctgaggctggaaggagcttgcaggagagaaaactacttgtgaagactatcctcttggggagaaagggtggagagaggcatccacagactgcctggggaatgctatccctgctcctcatccctcagctgcaactgaagttctgctggatcctcagaggggctagacaacagatgtcgccctcccctcacaaatacaagagctcttcctggtatgcagatgaactgatctgcacctggcctgttctgtctctgcggctgtgacacatatgtaacccaaggaatgctaccttccccatcctaaaaaagtactgttgcccacaggtggtacctagaaaaactgagatcctgacaaaggggctcttctcagttgcatttcactgtagcacctggaggatttctggaaacaaaagctcaatgaaccagatctcaccatcttcagaagacctaagaggtcctgagggaaacagctaaaacttggcctaccagcccttctgcataactacccttcaagagcgagctgtcagaaagtttcccacaccagaagtcctggctcaccaccccttagagagtagcagtgcagggcccctggatctgcagagctccctgctttcccttcccaacttaggctcatagtgacagaggtgaaaaagcctgcaaagcgcatgtgtgtatccagggggcagggccatgccatcaggccacaccaacaggtccctgaaagagctgagctaagggcaggtcggggacaaactgggaactgtctccctcattacagcagcctcaagaccgggctctcttttctggcctggcctcgatgtccctggcaaggagggatgggtaggactggtgttggaaggtgcagaattcttggcacttcatggcatcagtaggggggcctgaagcaggctggacgggggatggaacatgaaacatatcttcagcctgatttcattctaagagcattttgttgactggtatgtgcagcaccctggaatgtagagtaacagagcaacacacacctgtgtgacttgggttgcacgggagcttcatcttcctctgtaacgaagaagcctggtctggccaaggggtcaggtcaaaatagttttgtggataacaacctctcttttcctctctttccaatgagctctctcctccctttccaataaactctctccctgagtagtttcccttgtgctagcctatgattgctcaacacaaaccctagaaagccaatggtttagtaccatgttcccatgcctcccaggtagaggggtttgattcttttgtggctggcaggggtgggacaggcagccaagcaaatgactcaaacagaaaagctctttcagggaaagctgactctccagcacagcacacttcaaagcccacaagcacaaggttccaaagctctcaacccccagcattgacagtcctgcatctcagtacccccaggttcttcccagcccactaggcctgaagcaaccaaagagaaatgcctgagaaaaaccccaaccgggaggctgggaggggctggtgtcctctgtaagatcctaccttattaaaagagcagtgagtacctggaggactaggtcaggaggacagggaggctgcttaccccaaagccaggtgtagaacttgcaggtaggaatcaaagtgatcccatacagggctcccaagtgtagcagagacataaggatgatgtttctccagacatattcaaccttggggcttgggccttccttatccttgtaggtggggtcatatatatcatcttttatatcagggcgaatgtcgtcttccaagtagaggggcatcgtctccaacttatctcctccattctgcaggaccctggagggaggcgctgtaatggtggtggtggtggtataggagctagagatctggaagggggaggaagaggagagtcaggagaagagacacgtggaggcagctggggccactccgctctctaatcacgctgggggaagggtggacagtacggacccttccgcagcgccgtagttcactgagggtagggtgtatccgagacgcaacggagaaaagttccctgaaactgtacagatacattaggggcggagggcgagggggacgaggggcgcgaaacctatcgggaggcggcagtaggaaggagaagtaaagcactcacatccccacgaagacaaaggaaaacccgcataattcataaaagcaccagcacgaccggatttttctttaaagcttaagaaactaaagttggagactcaagtccccaaattacaatccacattcccaactcacggaaggcagcacaactcgaaaaagatgaccaagtcctccgcggagctctcccctctcttctgccaccaacccgtcccctggaagcccagcccgcgcctgcgacccggcggtacggggccaggctgggaaactcacatcgtcctgcagcaagtgggccggcatcttggctctcggatgccgggatcactttccagggggctgaggctccggagcggagttcggggtcgccggaggactgcggtttcgaagcccgccggtacgcgctgagccgcggcgccttgcacgctagctggttgtcggcgctagccgcggtgcgtggaggtccccgagccgggaatttaaaggctagagctggcaacgggtgaccgtgtccggtatttcctcagcccccttttatccgctgccaagcaggggcaaagtgcgaggagttgactggcgcgggcggtcccgcgtggaggtaagggcgggagggggaggagacagaggccgaggctcgcggcgaccgcagcagggcgccggggatgctgccgacaccgacaccac

SEQ ID NO: 1866 - DNA, 98 bp, Homo sapiens
tgtaatcccagcactttgggaggccgaggcaggtggatcatctgaggtcaggagttcgagaccagcctgaccaacatggtgaaaccccatctctacta

SEQ ID NO: 1867 - DNA, 98 bp, Homo sapiens; identical to SEQ ID NO: 1866

SEQ ID NO: 1868 - DNA, 114 bp, Homo sapiens
gtagagacggggtttcaccatgttggccaggctggttttgaactcctgacctcaggtgatccacatgccttggcctcccaaagtgctgggattacaggcatgagccaccacgcc

SEQ ID NO: 1869 - DNA, 103 bp, Homo sapiens
acacctgtaatcccagcactttgggaggccgaggcaggtggatcatctgaggtcaggagttcgagaccagcctgaccaacatggtgaaaccccatctctacta

SEQ ID NO: 1870 - DNA, 845 bp, Homo sapiens
cccgtcgttttacaacgtcgagactgggaaaaccctggcgttacccaacttaatcgccttgcagcacatccccctttcgccagctggcgtaatagcgaagaggcccgcaccgatcgcccttcccaacagttgcgcagcctgaatggcgaatggcgcctgatgcggtattttctccttacgcatctgtgcgggatttcacaccgcatatggtgcactctcagtacaatctgctctgatgccgcatagttaagccagccccgacacccgccaacacccgctgacgcgccctgacgggcttgtctgctcccggcatccgcttacagacaagctgtgaccgtctccgggagctgcatgtgtcagaggttttcaccgtcatcaccgaaacgcgcgagacgaaagggcctcgtgatacgcctatttttataggttaatgtcatgataataatgggttcttagacgtcaggtggcacttttcggggaaatgtgcgcggaacccctatttgtttatttttctaaatacattcaaatatgtatccgctcatgagacaataaccctgataaatgcttcaataatattgaaaaaggaagagtatgagtattcaacatttccgtgtcgcccttattcccttttttgcggcattttgccttcctgtttttgctcacccagaaacgctggtgaaagtaaaagatgctgaagatcagttgggtgcacgagtgggttacatcgaactggatctcaacagcggtaagatccttgagagttttcgccccgaagaacgttttccaatgatgagcacttttaaagttctgctatgtggcgcggtattatcccgtattgacgccgg

SEQ ID NO: 1871 - DNA, 776 bp, Homo sapiens
  SITE (709): n equals a,t,g, or c
  SITE (738): n equals a,t,g, or c
tacaacgtcgtgactgggaaaaccctggcgttacccaacttaatcgccttgcagcacatccccctttcgccagctggcgtaatagcgaagaggcccgcaccgatcgcccttcccaacagttgcgcagcctgaatggcgaatggcgcctgatgcggtattttctccttacgcatctgtgcggtatttcacaccgcatatggtgcactctcagtacaatctgctctgatgccgcatagttaagccagccccgacacccgccaacacccgctgacgcgccctgacgggcttgactgctcccggcatccgcttacagacaagctgtgaccgtctccgggagctgcatgtgtcagaggttttcaccgtcatcaccgaaacgcgcgagacgaaagggcctcgtgatacgcctatttttataggttaatgtcatgataataatggtttcttagacgtcaggtggcacttttcggggaaatgtgcgcggaacccctatttgtttatttttctaaatacattcaaatatgtatccgctcatgagacaataaccctgataaatgcttcaataatattgccaaaggaagagtatgagtattcaacatttccgtgtcgcccttattccctttattgcggcattgagcctgtctgtttttgctcacccagaaacgctggtgaaagtaaaagatgctgaagatcagttgggtgcacgagtggngtacatcgaactggatctcaacagcggtnagatcctcgagaggtttcgcccccgaagaacgtttttc

SEQ ID NO: 1872 - DNA, 878 bp, Homo sapiens
  SITE (741): n equals a,t,g, or c
gaaaaccctggcgttacccaacttaatcgccttgcagcacatccccctttcgccagctggcgtaatagcgaagaggcccgcaccgatcgcccttcccaacagttgcgcagcctgaatggcgaatggcgcctgatgcggtattttctccttacgcatctgtgcggtatttcacaccgcatatggtgcactctcagtacaatctgctctgatgccgcatagttaagccagccccgacacccgccaacacccgctgacgcgccctgacgggcttgtctgctcccggcatccgcttacagacaagctgtgaccgtctccgggagctgcatgtgtcagaggttttcaccgtcatcaccgaaacgcgcgagacgaaagggcctcgtgatacgcctatttttataggttaatgtcatgataataatggtttcttagacgtcaggtggcacttttcggggaaatgtgcgcggaacccctatttgtttatttttctaaatacattcaaatatgtatccgctcatgagacaataaccctgataaatgcttcaataatattgaaaaaggaagagtatgagtattcaacatttccgtgtcgcccttattcccttttttgcggcattttgccttcctgtttttgctcacccagaaaacgctgtgaaaagtaaagatgctgaagatcagttgggtgcacgagtgggttacatcgaactggatctcaacagcggtaaaaaccttgagagttttcgnccccgagaacgtttttcaatgatgagcacttttaaagttctgctatgtggcgcggtattaatccctatttacgcccgggcagaagcactcggtcgccggatacactattctagaatgacttggttgagtactaacca

SEQ ID NO: 1873 - DNA, 586 bp, Homo sapiens
cgcgttggccgattcattaatgcagctggcacgacaggtttcccgactggaaagcgggcagtgagcgcaacgcaattaatgtgagttagctcactcattaggcaccccaggctttacactttatgcttccggctcgtatgttgtgtggaattgtgagcggataacaatttcacacaggaaacagctatgaccatgattacgccaagctatttaggtgacactatagaatactcaagcttgcatgcctgcaggtcgactctagaggatccccgggtaccgagctcgaattcgccctatagtgagtcgtattacaattcactggccgtcgttttacaacgtcgtgactgggaaaaccctggcgttacccaacttaatcgccttgcagcacatccccctttcgccagctggcgtaatagcgaagaggcccgcaccgatcgcccttcccaacagttgcgcagcctgaatggcgaatggcgcctgatgcggtattttctccttacgcatctgtgcggtatttcacaccgcatatggtgcactctcagtacaatctgctctgatgccgcatagttaagccagccccgacacc

SEQ ID NO: 1874 - DNA, 150 bp, Homo sapiens
cgtcgtgactgggaaaaccctggcgttacccaacttaatcgccttgcagcacatccccctttcgccagctggcgtaatagcgaagaggcccgcaccgatcgcccttcccaacagttgcgcagcctgaatggcgaatggcgcctgatgcgg

SEQ ID NO: 1875 - DNA, 179 bp, Homo sapiens
tggccaatatggacaacttcttcgcccccgttttcaccatgggcaaatattatacgcaaggcgacaaggtgctgatgccgctggcgattcaggttcatcatgccgtttgtgatggcttccatgtcggcagaatgcttaatgaattacaacagtactgcgatgagtggcagggcggggcg

SEQ ID NO: 1876 - DNA, 2673 bp, Homo sapiens
agaaaaagtttggaaaatctacaaaaagaagtgtgaatttgacaataactatttcactagcaagggtagacgtaagcagaatacaggtagcatattcaaactgctgtggaaaaacaacatcaaacctagacttctctccccaaactatcattcagagtcgagggcaaaataaatagattttctgacttggaacaagtaggaataatgtacttatagtattcatcttcatacagggatggactataagtgatttttaaaaaacttcctacttgttccaagtcagaaaaactattcatatagggatgggctattagcaagagtatatgaataacgtactataacaagaaaaaatgaattgagaagaaagtagtggttttaagaaggaaaggagaacaaataaattagtgaaacataaggttaagtctatacatattattttctaattgcctattatgtcagactacatgtagttagaaaatacgatgaaagaaaaagccatattataattccaacaaaaagataaaataattaagaataactgcaacaagaaaatataagttctgcaacaataaaactatacaatgaaactaaagagcacaaaaaagaacttaaacagataaaaagcagaccacgtttttggataagaagattaaaaattataaatatatcaattttcactgttaatctataaattcagtgtaatcccaataaaaatgccaacaggttttccccaatagcattgaaatgattttaaaatttaatgaaggccaagcatggtggctcactcctgtaatcccagcactttgagaggccgaggcaggtggattgcctgagtccaggagttccagaccagcctggacaacatggtgaaatcccgtctctatttaaaatgcaagaaattagctgggtgtggtggtgtgcacctatagtcctagctactcgggaggctgaggtgggagaatcacccaagccttgggaggtcgaggctgtagtgagccaaaatcacatcactgcactccagtctgggcagccagagtgagaccctgtctcaaaaaaaaaaaaattattggaaactacgaggcaagaatatccaagaaaaatctagaaaagaagaaacctgagtgagtcagcatgaccaaatattaaaacatcttataaagctacaataattaaaacaatgtggtgctgatatgtggagggtcaatggaacaagatgaaatggccaaaaataaatttaaaatacatgttgaaatgtattaacagcatatgttaaagttaagttatgttaactttatatgttaaattcaagttaattggggaaagatggattattcaatatatgatgaacaactctgtcacccagctaaaaaaaattaagcttgggccatatgccagactagataccaaaataaattccaggaggaccaagtttttaaaagtaaaaatatggaatcatggaagtgcatgaagaagaagtagcacttaaaaaaataataatctcagcatggggaaggtctaagtatggccctcaatcagaaaccaggaaggaaaatattgactattttaaacaaaattatctctgtaccaaaaacagcataaaaggtcaagaaacaacacactggaaaaagaattgcaatgaatatcacagccaaatagttaatttcttattttcaaaaaatagcttctacaaatcgaagagaaaaattctaaggtctcaaaggaaaaatgagcaaaggatttgacaggtggtagaatacagaaaaagaatttaaaatagctcctaaagatatggaaacattactcatgatagcagaagtatcaattgacaaaattactcagattggtaacaaactttaagggggaaagcacttccatgcattgctgtaaattggtacatcttctactgagaacaatccggcagtagttaacaaaattgtgaatgcatatatctctttctctagaaatttctcttttgggaatttattctacatatatattcaaacgtgtgaaatacttctatacaggtgattgaatttcactttattcctaagagcagaagactgcaaaatagtaaatatatacccaaaagggtctaatggattagtttttggcatatcagcacatgataatactatgaagccataaaaaagagagatctctatatgtattgatgggggaccatctttaagatatactgtggtgttgaacaaaacaacatgctgaaaatgtctcttattcttttagaatcaatataagtctgtgcttgtaaatgcagtaagtatctttggaagtatacctaaaaattggtaatagtgtttgactccagggaagaacagatgggtgccagagtgaaaaaaagatagcttttgctttttatgacttttggattctgtaccacgtaataattttgatgtaaattttgctgtgtgtgtttttacttgttcatgtagtgattttataaattactcttttaattttctatcaatgaatatcctgggataaacccctcatgatcataatgaataatgatgtgtggagagtggggagggtttacatatgaaaaatgtagaaaatacaaaaagtgtctatatatacaaaaatgtaagtgttaacatttttatatttgcttcaagctttttttttaaataaaagaaatgcaatattgcaattaaa

SEQ ID NO: 1877 - DNA, 4149 bp, Homo sapiens
ggatggagcaggtagctcatctggccttgtaggtgccgggaacgggcaagacatgttttgaaatgtaagatcacagactgttttttgcaagaccacattatattactttattattttctgctttttcttttaacgacattagtgtttttgatcactatattttaaaatgctttttgtgagccttttggttatgtggaatctgttccttagctctgattttttattcttatggagcgtcttaggttactacatgaaggtaagactgccacagtcccccagggaggcacactgtgttttactgattgatttgaagatgatagagagcctagggggatgagtctattggactcaaaggttacattttgtttttccatttaatttaataatcaacaaaacgacaaagtcagtttaatatctttcttctgctgagtcttcaggatgttagctagtctttcaaaagccattgctacaaaagtgcaaatttctcatttcctgtgggtctctagaaactctctcaatatttaaagccaaacaaatccatcttttctgagagacagaaactaaaaaattcagagttaattcactattaaaaacagcaaggccctgctatttcccaagaataaagaaatttaaaattctcattgtaagaagtatgaacttgaagctagaattggtttatttctggcagctacttacaatattaagaactttactttttaaatttgagacaatttcacaggaaagcaagaaattagtctattgtgaaatgtttttacaactaacttggaatatactgcaaatcactagtaagtagagacacatttaagataaaatgattaataaaacaattggtaattctgaataaggatctgaataaatccagatcacagactgttcctttaccaatatgtaaaagaatgtgcaaaattagtaaaaatatacccaaaaatttaccagcaacagagaagcaaagaatggagttcaaccttacactataaacatctaatagatatgtatgaaaatttaaaaactagaaaaggttgggcatggtggctcatgcttgtgatcccaggactttaggaggccaaggtgggaggattgtttgagcccaggagttcaagaccagcttgagcaatatagtgagaccctgtctctacaaaaacaaacaaacaaacaaacaaataaataaataaataaaattagctgggaatggtgatgcacacctggagtcctagctactcagaaggctgaggcaggacgatcacttgacctcagaagtctgaggttacagtgagctatgatcataccagtgcactccagtctgggtgacagaacaagaccctgtctccaaaaattaaataaataaaacaaaaaaaaagaatttaaaagttttatataaaggcatagctactatctcatctgcccagtgtagtcatgaatagatgtcacataaagaaaagaaaaccagaattcttgttaatatggccagtttgaagggtggtggcggaggtattgagcaggcagctcagggaaatgccagggagacccttgagcacagaaactcctgattgtccccagggactctccgtggacacaggagggattttccaggatttcacatgaattcaatgaagggggctgtgtcttattcctggatgctttgcctccttcatggaattcagtggatttaatggaagttcctaggcaacaataaagagtagaaaccaggttaacagcgagggcctcatctcacaccagatcatatcaggctacacaaaagtagatggaagacaccacccaggcctccagctatacactggagaagaagccaaactagtctacttcatctaagaaagttgtcaaagagagcccttctatactatcttaaggtaaaaagaaagactctacccagctgccctgattaagcattagaaagataagtgttctgatcattaggcgaaagacaatggggaaaaatgtagaaaagaaatatgacatgagccagatgaagaacccatcctgaaaggatatataactcaggggacaaaagacaactcaccataagttgggcgcagtggatcacgcctgtaatctcagcattttggtaggccaaggcaggtggatcacctgaggtcaggagttcaagtccagcctggccaacgtggtgaaatcctgtctctactaaaaatacaaaaattagctgggtgtggtggtgcatgcctgtaataccagctactcagaaggctgaggcaagagaattgcttgaatcaaggaggcagaggttacagtgagccaagatcaggccattgtacttcagcctgggcgacaaagtgagaccctgtctcaaaaaacaaacaaagcctccccatagatgtctcctgccatagaagaatttaagaagttcataaattcaataaaacaagagttgaaggcctgtcccactgtacccaatttctccctctctgaactgcagcctagaaactctctacaggcagtaagctggggcagtcacagaggtgacctcatctgtttcccacatcctgcattaggacagtgatcagggatcagtatccttcattgactgatttccaatatctcgagacctgttgtttcatatattttgccttattttgcaattgtttcatatattttgtcttattttgcaattgtttcaggagggaggataaatatggtccctgttcctctatcttgaccagaagcatctaagaaggcagtgaagcaacatgtgtacagttcttagggaaacaaattttgacctaaaaatattaaacctagtcaaaatattattctagtacaaaggcagcacatgggtatttttgaacataaaagagttctagaaatacaggacccatgaatcattcttgaagaaaagttactcagtaaggaaatctagctaagcaagcaacatgtacaaataaaagattattataattggaccaaagttaagtttaaatccattcacatgtatataattaagatatataggaattataattacagaaaagaatgttacaaaccttcacaaagtaaaaatatttttatatcagatagattcttctgtttcaatccataaaaccagggtttggatcattttaaaaaaacaaacaaaaataatttattggaatcattagggaggacctgatagaataaaatgacaagctgaccaaataggccttaaaagggagaggtgcctgggcagttacaaagacctaggtagcaggggtgacttggccacagtcattttctttacttgatttaaggagggtaaattacagtgagagagttgcacttatttagtttgcataccgtactcaactcttagctagcatagggcaggttccttagttgaaaaatttccacaaaacatgatgtaaagtggaaagatcagttcccccaaagaatatcagttaccaaagtaggatgaaaggatgttgggtagatcaaaacaacaaatgtccattacagcaattaacaaaagttagggagtggggaagtctgagtgctaatatggatttcaaaacaactttaaaaatggcttcaaacattttatgctttttgtaatttagtcattttaatattagataaatcttcctgtaactgaaagttcttgagttaaagaaaaatattcggtagttcagctcttccttcaattttattagttgctttttcttttgttcaagtgaaataaacataaaaataattttaaaatattatgtatcatatccttcgatttaacataattctatctagctgttcttatattttctctgatatatttttaaaagctttctggaatattattaaccttgaatatttctagttgatgagtttatgagtgatttattgcttccttttctctttcagtattgctagaattaattttattgactttgcccctttgcataaagaccttgaaggtcacatgctgaaatcgccctctactaaaacaaactcatagaaataatggggaagatatttcaaaacattgccatatgcatagccatcctcacaaccaagaaaagcgcctctccatgaactaaaacctatgagtcattggtacaggtagggaaaatctaggtaaaccacggtaatacactgaggctggcaccaccacaggccaggacaacc

SEQ ID NO: 1878 - DNA, 6766 bp, Homo sapiens
ccacagctcaaggaggcctgcctgcctcagtagactccacctctgggggcagggcacagccaaacaaaaggagcagaatcttctgcagactaaaatgtccctgtctgacagctttgaagagagcagtggttctcccagcacagagctggagatctgagaatggacagactgcctcctcaagtgggtccctgacccctgagtagcctaactgggaggcaccccccagtaggggcagactgacacctcacacagccaggtactcctctgagacaaaacttccagaggaacgatcaggcagcaacatttgctgttcaccaatatccactgttctgcagcctctgctgctgatacccaggcaaacagggtctggagtggacctccagcaaactccaacagacctgcagctgagggtcctgactgttagaaggaaaactaacaagcagaaaggacatccacaccaaaaccacatctgtacatcaccatcatcaaagaccaaaggtagataaaaccacaaagatggggtaaaaacagagcagaaaaactggaaactctaaaaaccagagcgcctttcctcctccaaaggaacacagctcctcaccagcaatggaacaaagctggatggagaatgactttgacgagttgagagaagaaggcttcacatgatcaaactactccgagctaaaggaggaagttcaaacccatggcaaagaagttaaaaaccttgaaaaaaaatcagacgaatggctgactagaataaccaattcagagaagtccttaaaggacctgatggagctgaaaaccaaggcacgagaactacatgatgaatgcacaagcctcagtagccaatttgatcaactggaagaaagggtatcagtgatggaagatcaaatgaatgaaatgaagtgagaagagaagtttagagaaaaaagaataaaaagaacgaacaaagcctccaagaaatatgggactatgtgaaaagacggggagaatggaaccaagttggaaaacactcttcaggatattatccaggagaacttccccaacctagcaagtcaggccaacattcaaattcaggaaatacagagaacgccacaaagatactcctcgagaagagcaactccaagacacataattgtcagattcaccaaagttgaaatgaaggaaaaaatgttaagggcagccagagagaaaggtcgggttacccacaaagggaagcccatcagactaacagctggtctcttggcaggaactctacaagccagaagagagtggggaccaatattcaacattcttaaagaaaagaaatttcaacccagaatttcatatccagccaaactaaagcttcataagtgaaggagaaataaaatcctttacagacaagcaaatgctgagagattttgtcaccaccaggcctgccttacaagagctcctgaaggaagctaacacataataatcttaaccttaaatgtaaatgggctaaatgctccaattaaaagacacagagtggcaaactggataaagagtcaagacccatcagtgtgctgtattcaggaaacccatctcacatgcagagacacacataggctcaaaataaagggatggaggaagatctaccaagcaaatggaaaacaaaaaaaggcaggggttgcaatcccagtctctgataaaacagactttaaaccaacaaagatcaaaagagacaaagaaggccattacataatggtaaagggatcaattcaacaagaagagctgactatcctaaatatatatgcgcccaatacaggatcacccagattcataaagcaagtccttagagacctacaaagaaacttagactcccacacaataataatgggagactttaacaccccactgtccacattagacagatcaacgagacagaaagttaacaaggatatccaggaattgaactcagctctgcaccaagcagagctaatagacatctacagacctctccaccccaaatcaacagaatatacattcttctcagcaccacaccacacttattccaaaattgaccacatagttggaagtaaaggactcctcagcaaatgcaaaagaacagaaattataacaaactctctctcagaccacagtgcaatcaaactagaactcaggactaagaaactcactcaaaaccgctcaactacatggaaactgtacaacctgctcctgaatgactactgggtacataacgaaatgaaggcagaaataaagatgttctttgaaaccaacaagaacaaagacacaacataccagaatctctgggacacattcaaagctgtgtgtagagggaaatttatagcactgaataaccacaagagaaagcaggaaagatctaaaattgacactctaacaccacaattaaaagagctagagaagcaagagcaaacacattcaaaagctagcagaaggcaagaaataactaagatcagagcagaactgaaggaaatacagacacaaaaaaaatccttcaaaaaatcaatgaatccaggagctggttttttgaaaagatcaacaaaactgatggaccgctagcaagaccaataaagaagaaaagagagaagaatcaaatagacccaataaaaaatcataaaggggatatcagcaccaatcccacagaaatacaaactaccatcagagaatactataaacacctctacacaaataaactagaaaatctagaagaaatggatgaattcctcaacacatacaccctcccaagactaaaccaggaagaagttgaatccctgaatagaccaataacaagttctgaaattgaggcaataattaatagcttaccaaccaaaaaaagcccaggaccagatggattcacagccgaattctaccagaggtacaaggaggagctggtaccattccttctgaaactattccaatcaatagaaaaagagggaatcctccctaactcattttatgaggccagcatcatcctgataccaaagcctggcagagacacaacaaaaaaatagaattttagaccaatatccctggcgaacattgatgcgaaaatcctcaataaaatactggcaaaccgaatccagcagcacatcaaaaagcttatccaccatgatcaagtgggcttcatccctgggatgcaaggctggttcaacatacgcaaatcaataaatgtaatccagcatataaacagaaccaatgacaaaaaccatatgattatctcaatagatgtagaaaaggcctttgacaaaattcaacaatgcttcatgctaaaaactctcaataaattaggtattgatggtgtgaccggaattggtgggttcttggtctcactgacttcaagaatgaagccagggaccctcgtggtgagtgttacagctcttaaggtggcgcatctggagtttgttccttctgatgttcggatgtgttaggagtttcttccttctggtgggttcatggtctctctggctcaggagtgaagctgcagaccttcgacggtgagtgttacagctcttaaggcagcacgtctggagttgttcgttcctccccatgggctcgtggtctcgctggcttcaggagtgaagctgcagactttcacggtgagtgttacagctcataaaagcagtgtggacccaaagagtgaacagtagcaagatttattgcaaagagcgaaagaacaaagcttccacagtgtggaaggggaccccagtaagttgccaccgctggctcaggaagcctgcttttattctcttatctggccccacccacatcctgctgattggtagagcccagtggtctgttttgacagggcgctggttggtgcgtttacaatacctgagctagacacaaaggttctccatgtccccaccagattagctagatacagagtgtccactggtgcattcacaaaccctgagctagacataaaggtcctccacgtccccaccagactcaggagcccagctggcttcacccagtggatcccccaccagggcagcaggtggagctgcctgccagtcctggtgccgtgcgcccgcactcctcagcccttgggtggtcgatgggactgggcgccctggagcaggggatggcgctcgtcggggaggctccggccgcactggagcccacggagggggtgggaggctcaggcatggcgggctgcaggtcccgagccctgccccacgggaaggcagctaaggcccggtgagaaatcgagcacggcgctggtgggctggcagttctgggggacccagtacaccctccgcagccgctggcccgggtgctaagcccctcattcccccgggcggcagagccagccggctgctctgagtttggggcccgccatgcccacgcccacccggaactccagctggcccacaagcaccgcgcacagccctggttcccgctcaggcctctccctccacacctcccttcaagctgagggagctggctctggccttggccagcccagaaaggggctcccacagtgcagcggtgggctgaagggctcctcaagtgccgccaaagtgggagcccaggcagaggaggcgccgagagcaagcgagggctgtgaggactgacagcacgctgtcacctctcaatggggcatatctcaaaataataagagctatctatgacaaacccacagccaatatcatactgaatgggcacaaactggaagcattccctttgaaaactggcacaagacagggatgccctctctcaccactcctattcaacatagtgttggaagttctggccagggcaatcaggcaagagaaggaaataaatggtattcaattaggaaaagaggaagtcaaattgtccctgtttgcagatgacatgattgtatatctagaaaacaccatcgtctcagcccaaaatctccttaagctgataggcaacttcggcaaagtctcaggatacaaaatgaatgtgcaaaaatcacaagcattcttatacaccaataacagacagagagccaaatcatgagtgaactcccattcacaattgcttcaaagagaataaaataactaggaatccaacttacaagggatgtgaaggacctcttcaaggagaactacaaaccactgctcaatgaaataaaagaggatacaaacaaatggaagaacattccatgctcatgggtaggaagaatcaatatcgtgaaaatggtcatactgcccaaggtaatttatagattcaatgccatccccatcaaggtaccaatgattttcttcacagaattggaaaaaactactttaaagttcatatggaaccaaaaaagagcccacattgccaaatcaatcctaaaccaaaagaacaaagctggagacatcacgctacctgacttcaaactatactacaaggctacagtaaccaaaacagcatggtgctggtaccaaaacagacatatagaccaatggaacagaacagaggcctcagaaataacaccacacatccacaaccatttgatctgacaaacctaacaaaaacaagcaatggggaaaggattccctattcaataaatggtgttgggaaaactggctagccacatgcagaaaactgaaagtggaccccttccttatgccttatacaaaaattaactcaagatggattaaagacttaaatgttagacctaaagccataaaaaccctagaagaaaacctaggcaataccattcaggacataggcatgggcaaggacttcatgtctaaaacaccaaaagcaatggcagcaaaagccaaaactgacaaatgggatctaattaaactaaagagcttctgcacagcaaaagaaactaccatcagagtgaacaggcaacctacagaatgggagaaaatttttgcaatctactcaactgacgaagggctaatatccagaatctacaatgaactcatacaaatttacaagacaaaaacaaacaaccccatcaacaagtgggcgaaggatatgaacagacacttctcaaaagaaggcatttatgcagccaaaagacacatgaaaaaatgctcatcatcactggccatcagagaaatgcaaatcaaaaccacaatgagatatcatctcacaccagttagaatggcgatcattaaaaagtcaggaaacaacaggtgctggaggggatgtggagaaataggaacactttcacactgttggtgggactgtaaactagttcaaccattgtggaagtcagtgtggcgattcctcagggatctagaactagaaataccatttgacccagccatcccattactgggtatatacccaaaggactataaatcatgctgctataaagacacatgcacacatatgtttattgcagcactattcacaatagcaaagacttggaaccaacccaaatgtccaacaatgatagattaagaaaatgtggcacatatacaccatggtacacgatgcagccattaaaaaggatgagttcatgtgctttgtagggacatggatgaagctggaaaccatcattctcagcaaactatcgcaaggacaaaaaaccaaacactgcatgttctcactcacaggtgggaattgaacaatgagaatacatggacacaggaaggggaacatcacacaccagggcctgttgtacggtggggggaggggggagggagagcattaggagatatacctaatgttaaatgacaagttaatgggtgcagcacaccaacatggcacacgtatacatatgtaacaaacctgcacgttatgcacatgtaccctaaaacttaaagtatatataaaaaaaagagtt

SEQ ID NO: 1879 - DNA, 530 bp, Homo sapiens
atgctttccttttcattctattattgaattttggttttccatgtgttacttttgtgtactctccccttatttcaacaaagcattaattaaatatttgagtacctattctgtatagtgacttgaactagatctttagagatacaaggttgaataaaatacagaccctatcatcaaggataattctagtgacaattatatttcacattatttctgtcaggtcttgataatattttaatcacaggaaccaccatagcagtccagactcattttattatttatcatctctcagtaactgctccgacagtggcaacaaagggtattgaatacttatatttcaaattttaaaatttatgataatttggagggaggtgaaaaaaccttactaggaaagacaaacattcattattctacgtgtgtgtgagctcatgtctcttactcttagcatcctgggaattaagtacagccttctgtgtaggtgttcctttaaagaaaacaactttaatgcattttacctctgcacatttccactg

SEQ ID NO: 1880 - DNA, 12079 bp, Homo sapiens
agccccattgacaaaccttcagattctctcagtatagggaacggtgataattcccagcaggtaagatttgaatacagtatcacttgatttatttgccatactccgaaagcaaggtattccatgcaggtgaattttctaaaaatactttactgacacaatttaaaaacacttttgatgctcatctttattaatcatattataattagccttttccccccagaatatatagagcatagtttaacccttttttaatgactcagaattatcattatgaccagatactattatctttagagtctgctaatgttattggtctttttgaccctgtgccaaatggtcccaggctagcatgccttctgagttccttgcttttaagaattgtattcctaccacatactccccttgccccttgctctctactttaattttctatttcagtcaagtgtatttgtccctaacagtttcccttcttattttccccaaatgactatcagctttgaaatgataagccagataaactgttcaaagttgaatttactatgaaactgagtggagtgctgaccgttagagcatgctttatgtcatcttgtcttattgctcagggaacttttttttttttttggctagtttttcactccttgagtttctatacatcttcttacattggtaaaataaatgtaatttagtatctcccgtaaagaatagccagtcctccacagtatttatgaaaaacttagagatctaaaatataatgcttttctaaacgttttaatgacacattttgtaaaagaatgtggaaatctgtatatccccttgtgtattttagttgcccattaacattttttacaggttaaaagtagttgcaaaggatgtaatttccagcatattagaaatattggtatctgaaaaatttaatgttttgatatcccatcataatgttttgatcataattctgttttattatcctgtcatccatttaaaaaaatacacatgctctcctttaacaatcagaagttttacattatttttttctctgtgaactaatttttctctttctgttattatagagttttatcttaatgcaatatagtttttgcttgaaaagcatatacttctcttaaaaataggcatataaatttttggattgaaataatgtttttgcggtcacagacttcaaatgccaatttttgtcttctgaattttattagtagtattgaggtgacactatacataaatgtagattttaattttaaaaaccatgaaacaaatagtaataaatggtaaaattatagtaaaataaatagtaaaattatattgaaaattcatctcttaatgaagaatagggccattttaaaattggtttgtatgtatctctagattaatgttacctattggtaaaagagccaagtttcagcagcaatctagtcgtgttttttatttttctaagatgtaagtgttgagataagatactttgttcatataaataggtagatggaaggaggagtattatatcagtaccactcaagtctttcaatttcttctgaattaaatacctaagaatcatacaaagatttattatacaaaattatttttaatgatgtgtttggaaacaacttaattagatctttctttaataatctagccattacagtcagtttctctcttatcaccaatccatgtatttctaataatttgtgtttggcctctggaaagttttcactcttgagcaaaatactgtagtaaaatcccagaatgagaaatattattttcttggtaaagtgagagaagtaaagttgtaaaaagagaggagatggccgggcacggtggctcatgcctgtaattccagcactttgggaggccgaggcgggtggatcacgaggtcaggagatcgagaccatcctggataatgcggtgaaaccccgtctctactaaaaatacaaaaaattagccgggcgtggtggcacgcgcctgtagtcccagctacttgggaggctgaggcaggagaattgcttgaaccccggaggccgaggttgcagtgagccgagatcaagccactgcactccagcctgggcaacagagtgagactccatctcaaaaaaaaaaaaaaaaaaaaaaaaaaaagggagactagtttaatcttttcaagcagattaatatttttttaaagagtatatatgtaagttaatgatttaattgattttctgaaacttcatgctttcattaaaacatcttcaagtaccagtttgtgaaacactattctaatacatttagttgcaaactttttaattgtggcttattaaaatgtataaacatgtagttattatttgttttccttttttattcagatatctaacagtgatacgccttcaccaccacctggtttgtcaaaatccaatccagtcatccccatcagttcatccaatcacagtgcacggtccccttttgaaggggcagtaacagagtcacagtcgttattctcagacaattttcgccatcccaaccctatcccaagtgggcttcctcctttccccagctccccacagacatccagtgactggcctacagcaccagaaccacagagcctcttcacatcaggtatataacaatagtaccaagtattagtaattatgctcttaacgtattgttgacagactaacatgaaactcattagtggatatatttttatcttttgcctctctgttctcttttaataaaaatgcaaatatttaaactacatggaattaggtggttaaatacattgttgtgtgacctagaaattactgtgttaaaagatttctccagaagtaaagggttatattgttttcccaatagtaaaaagcttattccattgggaattttttttttcatttttactttttggaggtgggggtcttggtctctcgcccaggctggagtgcaagtagtgtgatcttagctcactgcagcctcacaccctgggttcaagtgatcctcccacctcagcctcctggttaatttttaaattttttgtagagacagggtcttgctatactgcccaggtcttgaactcctggcctcaagtgatcctcccacccaagccttccaaagtgctgggattacaggcatgaagcactgcacctggcaaggacttagatttttaattagatttgtatttttatttaattagatttgtgtttaagattttccacccccagctgacaaagatgcaagttatttagtagtaacagttatgttactactaaatggtatttttgagccatttccatttttatccattctaaattctctcattactatgaaaggtggcataaaagtaacattgacaacagcacctgtggagcagaaaattccaaaaaactatgaggattaatataaatactttttaattaaattatatttttcttagtatagaaagcatgtattcaaaattatttgtactttgataaatacatttaaaaatcaactttactaattaaaatctgttatatttatttgatggaagtgacttaggttggttttgattatgaatggttgagagtataattggagtgtcaagtacatttttttcctttgattagcaaaatcagtctatatcattcagtttttgaagctagtagcttaagagttaagtaactgctagaagtacataaggccttttgtaattatatgatcttaatgtgctaagaagtcacatagattttgcacttacttaatttgtaaaatgacatgtttaactttcagtagcatggatacttattaagtatgaaaatgagctatgtatctgatattcatcactatttttcttcccaacagaaacaatcccagtatcatcctctacagactggcaagcagcttttggctttggttcttctaaacaaccagaggatgacttgggttttgatcccttcgatgtcactcgaaaagccttagcagacctgattgagaaggaactgtccgttcaagaccaaccttccctttcgcccacatctcttcagaactcctcttcacacactacaaccgccaaaggtccaggctctggattcctgcatcctgctgcagctacaaatgccaattctctcaatagtaccttttcagtcttgccccagaggttccctcaatttcagcagcaccgagcggtttataattcattcagttttccaggccaggcagcccgctatccttggatggcctttccacgcaatagcatcatgcacttgaaccacacagcaaaccccacctcaaatagtaatttcttggacttgaatctcccgccacagcacaacacaggtctgggagggatccctgtagcaggtaggttcatttaaaacctttgagaatttttgaataactcatattttcaggttgttgggtggatagggaagtaactgttgaataacagagtactaatatcttggaaatgtctatgaaagattagtctttatcataatctaaaatatatttttcattagatggatgccttgtaatattgagctttataaggatggtggagtattatacttagttattgtttggaagcattttacttaataggataattaccaaactttcatatggtatacaaatgcaaaatgaaaaagaagaaaatggtctctgaagttatggtactataaagtccaacaccgtggtgaaaattatgattttatattctaaagtaaaatggttaaaaaaaatttttttaatgataattaatgagagcatgagggataaagccactctctacctacttttggcagttacttgttttgactgatacacatatacacacacatcaaaactgagctataaatatacttgagaactctgattatgaatgttttacaagcatatcatatgtctcagacatacaccttttgtgaaagagaaattgttcaaggaaagatactttcccatttgatctgccatgtttttatttctggggaaaaatatgaagtatatataaggtaatgtaagtttgatgccaaaatacttctggttttgtactgctacccttgaaggtttcagaacttttgggttttaagattctatataacattttttagatgaagtatcttctatatccaagggaattattcttgttaatagtgttctcgtttaactttggctttagagatgatgttaaaaaaagtttgttcctctcctgattctctcaagtgaaatagaatcatgattctctcaagtagaatacaatagtttctcactctgttagaatagttcttcacataattcatacaatttattgttatcccttgttagatatggcatggcacagtattattgtaataggatacttttatcagcagcaaggcagaagttcacgctcttgtttttagcaaggctgatagatgaatttacagaggtctatcaaagttctttatccctgttccctttgggaccgacaatatttcatgttttagacgagtagctaggttaagagaatatagtttgtggctgttgacatagtgaaatttaccgttgatacagtgaagttaatttacataagcctggtagcacgtaatgtagttatttgcacagtgttgggactcttatttgttcatttaattatggtagttagtaggtaaccagagtgacatttttcagtcctcttcttctacatgatacttacttgtgaaacaatgtgttcagttccaaatactccttttatttccttccattcaagatagcatattagaatgtaattttctttgattttactttgctttaatcattgagaaatgtggcattttaattactagtagtgtatctcataattgattataacattcattaaaagttaaagttaagttctcccaaatcatcaaaacatttaaagattagaccaattacagtgaatatgagggtttctatttgcccatcaatgaattaggacatgtgggacatattaaagaagtttaagatatggataaaatttccacatacttaaagtatagttgaagagactaaaataatgtgtgaaagtggtaactatatgtctgatactggaatctgagagacatcaatgtaccctgtaattcttggggaggcttcattgaataagtaggaattgatccctactatcatatcttagatttgggttagcagcaggggaagagaaaaggccttttatgttgatggaaacctcctgagtaaaggcatagaggcaggaattagtatgtcattacactgagaagtaatacagctacctcctataacaggaggtgcttcttaaattgtatagatataatggatgagaagatgagaaactctgacaatgaggcaaaatggcatggacttggtatgataggaagtaggatgcctttatgggattctagttattagctgtcttctttttgtgcttttatttgacttattacatgacgatctttgattttcttccaatttcatagtcatcatattatcccttaacactgaagagtagttttaacccatatatttcaaaccaatagttattctcagaatgctgcactggtaatgagaaatcgctgattagtgagtttagttgtccttgtgttagtcatttaaaatcttcgtctaaagtagatgctttatggaaaaaatgtgacattaaattatggtcctatctttggggattttgttttaatttttaaaacttttaccatatactcaaccatagagcattaaaacctttttttttcagagatgctaaaaatgtagtcaccaactttaggttctgaatcgttgtactatttggtagggggtgggagagtttattttggattttcaatttcaggctatgcagacttgcttggtatttaaatggtgacttatggttaagcttattattaggttatttttaaggctctgatgactagagaaattttagttttaatgtaccaaaatttaaaaatttttatcaagagtctcacacaccagaatcctctcatggattataaatatttggtagatgccccagaaaactgaatgtgctaagcctcagagcagaatagctgtgtaattgtagccagaagatttaggattttcagtaactattagaaatgacagaaagtgaaaatctggaaaactatatatacatcttaactatgtctaatttgaagcaatttaatacctaggtaactcacttgcacctgttgtaactcacttgcacctgttctaactcacttgcacctgagttgaactattggcaaggattcaactttgtatcttttagcagttatcatgataccttacacagggcagctgtcactaaatgcttcagtaatggagagagtacatacctgtttcagtgggacctgctactttaagatatacttagacaatattttaaactaattctacactctggaaaggcatatatatttattctctaaatatgtagagcaaaatatggtctctgacctgtaagagcaaatcagagatggcagtcacctacatgtcatacagatagaatgtctacttactatacatttgtacttaaatttttatttttggtttgttcagtgaattattaaagattgatatatctgaaacctatcatgggaaaaacagttgccagaggtttgacagaaatgcagcttcctttttttttgatctaattgaaaactgtttttgtgtttaaaattagtagttatttccttaattaggtgaaacctttttagcagcatttggtttactaagtttagaaatatttttgacataaatattcttgggggaaattttgattcgtgggcagttacagtaaattcattcagatctttttttttattattattggaaccatatgccttctttctacaaagtgatttaccttgtcctaaaacgtgactttgttttgtccaattccttcattttaggaatagcaaagctgtgttccagaaagcttaaataatttgttaaaggtcacatattcaattagtagtggaattagggtaagaacttagatctcaaattcaacaatggaaatgtttttgcactacaacgatgccctccttcataaatgaagatcactggcatgtgctttaacttggctttcttcccgtggcaattgtttttgctctcacacacttggaagtccctttttatcaacagtatcaactcatgagacaaattggcccagctcaggggtatatggcctattgttacaaaatagaataaagtgtatcgacttgatagaaatcagtctgtttcttagtccttattaatatcattttcttgctaagaactctagtctaaaatttgctttacagagcctcattgctatgttcttggggtttataagaatctttgccaatttactgaaaaactacaaaatcacctgttatatggattgacagactctttttctgctttgtcagttatccttccacatgtaattttgcagatttgttttaaaaaaatattctgccaagttgtttttattccatgatgttaaaaattatttggaaaacataagtcagtaagcattgttgtttcaagatatacctcaaaaaatatttgaaactgtttaggattggatttttttttcatgtttttgttaatttaaactttacttttgagagggcatttttctttaaattttctttgtttctatatgaactgttttaacagtgacttgattgaattttgagtcatgtgtgaaacaagtcacttgtagtcaaataattttcagttataatcaggagaaccgatctcattcatctataattctctgacctagaagtagtcatctcattttcagtcaattggatcattgtactgttaacattttactatttttcaattacttcaaaggtaaacttgaattttcagatgctgtatgttaatttactagttaatatttatagctttcatttttttctagtacataatttatgctttcaaaacatggatttgtaatttttctcttttaaaaatcagttttcacttctgtaaatcaaggtttaattttttcacaaaatactattaatatttaccatttactaggagtatctataagggtccaattggcttggaaaagaatggctttcctggtctttttttttttttttttttttggtagtatgtttataatctaaatctattgtatttgttcttatctctgaaacaatattactcaggatatatttagaatataactactttccaagtacttgataagtttatattttaaaattcatgtcttgtttcacacctggattccaaacattaagcatgtattttatatatgtatcagtattccaaatattgaaatcatttttaaagggactgttaacaaatctagtcacccataactagaccatgactgacttttccacaggggaagaagaggtgaaggtttcgaccatgccactgtcaacctcttcccattcattacaacaaggacagcagcctacaagtctccacactactgtggcctgacaacagaactgagaggagaggattagactctggggtgcttgcatgggcaactggatttttgcatgattcctttatgattttgcttttaatgtatacacccagaagagccaatataaacgttcctcatgcctacagctagcgtgttacctcatagttgttgaagtatttcttcattaggcctttaacataatttattagtgtaataattttggcattgtttctcatgagtgatactatttctaactcataaaaataaacttgtagtactaagatcccaggtgagattagctagaattgttgttattttggctctattattgaaaaattatacaaaggtaatggtagtatcttgttttctggtttgtgaaaaaataatatcctaatctcctgaaaaatttgcaaattaacaagataatgtctattgcattctttgaatacttgagaagaaagaatacatataaaacaaaattggtggtgtcatttaatgctcagaaggatattgttggcgattgtttttagttgtctagatttatatcctataatatgcattacatgtgtagaaactgttttgttctctctcttttgcacttttgcactttctttttgaatggttgttaattatgcatagatggttaaaagataattattgtagcctaaatgcaatataatctcttttctaatgcactgcctagtataccaggaaatgcctcaaaaacagaacttcagtttatagttgacttatctgaaacttgaatacggagtaaacattgtatgtgaaaagcaaccatagtagtgtaacattgttactgaacaaacagtaattctgtgggatattgttttggaaatttcattgtttaataattaaaatgtgataataagataatattataagtacctgaccagaatgagactaaggcagaagagaagagattggatgtcctctaaaattaggccacctaaattgtaacagataattttaatcaagagaatagtggagtactttattaggacataatgtgaagtgatatttctgaaaacacatttcttgaaatagttttaaaactgataataaaggaaaagaaactgtacttagtttggagcagtggacaaaagctgattcagaaaacatgaccatattctgcctacatgaagcatctgggaagaaagggaaagtcacacctcctcttgagattttaaccattatgataaaaggtatgctttaatttgttaaaaaaaaaagtatgaaaggggataatgtgaatacaaaaaagaagcctagagattgaaaataataataatagaacatgttattaggagatggtacttaatgtcatgttggagttggagttttcaaggttacctctatataaaattggattattttctgttagatataatgtgacaaattaaatgactttatcccaaggtacagtgaggtaaacaaaaatctattcttagatatccttagatttggttaactgaggctgtagaagcagcgaattgtctagccatttaagttatttttgtaaaattcagcataaacatcaatctctaatttctatctagaagtgactttaagacattacaagaacattgccaatttggaaaatgccaataaaatactgtagacttattaatattgtagacttattatcagtcttttactatagcttaatttaattatggttttcatttttactgtaagaggccaagacttcacttatgtctcctgtggagctgaggctcctgggccttgttattataacaaactctggctccttgtaatgatgcttactagctcaaagccttctccagcattcagtgttagcctttcattgcctggatcttcttacaaagccatagcaagtggttagtgccatttgctccttggtgttgagagatatacctgttaaatgaggcttctttcctttctcattcatagccagcgtggaaaaatcatcaggtagtttgcccagatttgccagagccctaaataaaatggcaaaacgatctccctgcctgcttctcctccccacccccacttacatgcacaccgtaaatcaagaaatgctttttgggcaattagactttatcttctaaatttttgcatagaatggctaaacatgatcttttgcctcactttgtaattcctacaccttccttgtaagcttcaccttttgcttacctaatattttatttaaacatggttttttaaaaaacctgaagctttaaaatcatagtcataattaattttacactaaaggacagaagaaattatacaacacataaaagaagccactacttcacatagcaagcaaattgaaatcaaaatgacagaagaatgagaaattctttaaaagcttcaggttttttttgttgttgttgttaaattcctgcatgatgcatcatgtgcaagggaaacttaatatacttttacacccttaacctttataaagtgactagcttttcccttaacataggaatttttaacctggagcccagatttttgagagtacacacaaaattgtgggtttgtgtgcatgtacatatgtccatttttttctagggagaagatccatagttattagatttgtgaaggatttggtgatccccttctcccatcaaaaaaaaaaaaaaaaagaac

SEQ ID NO: 1881 - DNA, 347 bp, Homo sapiens
ggaacaaattgcagttgctttgaaatcttacagtggcctataggggttgggatagggcagtaaggagatccagctgaggtattcagggactggtaagcttggataagtgtgtttaaagccttgaaaaccagaagaagagtttagtcttgatgtgaatgtggtcagtggtagagaactataggttcttagcaaaaatgtagtttgaacatagcattttaagaacagtaatggggtaatagatttgattgcaattaggaccggttagaaagtaattccagtagtatgccattgctggccagtgcaaataagttggcctagactagcacagtagtggttggaatggagaa

SEQ ID NO: 1882 - DNA, 457 bp, Homo sapiens
gtcccacagaacacaatatctctaggaatggatttgatatctggcctcccttcatctcaacctatttctgggaggacttggatttgggaatataaatactattaaaagcaaaaatctgaactttatattgaaactaaggatatctgtttttaagtaagtaaaagggatcactttcaaataaaacaatcctctgccttctgcacactgtaaggcgctataattaactggaattagaaagcatgcattatgaacagaatttccttggaattgagtcctgcgaagataggcatgggcctaaacataaaattagattttaggtattaaagctgtcctcttctaagaaaataacctttaaagcagggtttcccaactgacactgttgacttctggaatggacatttctctttcttggggatggggcatcttgtgcatttgcaggatatttagcagcatcacc

SEQ ID NO: 1883 - DNA, 302 bp, Homo sapiens
agcccttgggcaagtccacgtactggccccactcctcggcgaacagctgcaccacgaatttgcggtgcatgtcgatctggtcgccgtacaggctgaggaacttctggatgagcagctcgtagcccgccccgtgtggcaccgacgagggtcgcgcgaagactgagaaacagaagagcaccgggactgtgcccgacggcgcccccgcgcccccggcgccgctgttggggagcgcaaggaccgccggctccgcagccgccatgttcccccgagcgtctgcgagctccgaggccgcccagtcgcac

SEQ ID NO: 1884 - DNA, 121 bp, Homo sapiens
ctacagaaacaaaccccaaaatctcaatagactgataaaacaaaggcttatttctcacctttcccagttaacagcaacatttgacaaaccaattactccctttattttgaaccatattcac

SEQ ID NO: 1885 - DNA, 431 bp, Homo sapiens
gtagagacaaggttttaccatgttggccagggtggtctcgaactcgtgacctcaaagtgatccaccgcacctggcctctttatttttttattgtttaattaaaaaaatatttattttatttttgtagagatgcgggtctcacaatgttgccaaggctaggttggtttttggcctcaagttatcctcctgccttggccttccaaagtgctgagattacaggtgtgagccactgtgcttctttgtctagtaagttttgatttgctactggatattgtaaatgtgatgatgttgggctctgggctttgtggtcttttgtaaagaatattgggttttggccaggtaccttggctcatgcctgtaactccagcactttgggaggccgaggcggacaggtcgcttgagcccacgaattcgagcctagcctaggtaac

SEQ ID NO: 1886 - DNA, 431 bp, Homo sapiens; identical to SEQ ID NO: 1885

SEQ ID NO: 1887 - DNA, 124 bp, Homo sapiens
tactccggaggctgaggcaggagaatcacttgaacctgggaggcggaggttgcagtgagctgagatcgcgccactgtactccagcctgggcgacagagcaagactccatctcaaaaaaagaaaa

SEQ ID NO: 1888 - DNA, 124 bp, Homo sapiens; identical to SEQ ID NO: 1887

SEQ ID NO: 1889 - DNA, 284 bp, Homo sapiens
ccccttccacatgagcttagccagaaaatggtctctggttctaagagactcgctttgtttgctttcattttcttggggatcatagtcctgcattgactgttctttagtgtttgaaaacacatttttcgtatatcttgtctatattttagttgtttatgatggacgtatttagataatttaatatctttttttatgtgaatattttccatttttaaatgtgtccaaaaaaagttttaggaacacaggctgagctacaaaatgtttatacattttttttaaaaaaa

SEQ ID NO: 1890 - DNA, 284 bp, Homo sapiens; identical to SEQ ID NO: 1889

SEQ ID NO: 1891 - DNA, 462 bp, Homo sapiens
acatggtatggcttgttacttctgggctacaaacctgtacagcatatgcctgtactgaatactctaggcaattgtaacacagtggtaaatgtttgtgtatttaaacatatctaaatatagaaaaggtgcagtgaaaatatggccacataatcttacgggaccaccgttgtacatgccgtttgttgttgacactgtcaatctataggtggcctcttagacctaagcattccctgtggaattcaacttagggccccaggagagctgcctgtctcccaaacaggacctggaaatgagttacaatgtattctctgagctatgcggttacctctaggagtgtcttgttgaaaatacggttttgctcaacacaggtaatgtgttgaaccacttataactaatttggtgccaatgtagaatagtaaaaagaacctggaatgtgtaatggaaagttctggtttgagctga

SEQ ID NO: 1892 - DNA, 88 bp, Homo sapiens
gcaatgagccaagactgcaccactgcactccagcctgggcaacagagtgagactctgtctcaaaaaaaaaaaaaaaaaaaaaaaaaag

SEQ ID NO: 1893 - DNA, 3471 bp, Homo sapiens
tgtaatcccagcactttgggaggctgaggcgggcagatcatgaggtcaggagatcgagaccatcctggctaacatggtgaaaccccgtctctactaaaaatacaaaaaattagccgggcgtggtggtgggtgcctgtagtcccagctacttgggaggctgaggcaggagaatgggatgaaccccaggaggcagagcttgcagtgagctaagattgcaccactgcactccagcctgggtgacagagcgagactctatctcaaaaaaaaaaaaaaaaaaaaaaaaaagataatcaaacaccaaagtactaggggaaaaaacacattgtttgagcccaggagccggaggttgcagtgagccgagattgtgccactgcactccagcctgggtgacagagcaagactccgtctaaaaaaaaaaattagcctggcatggcagcacacacttgagaggctgaggcaggagaattggttgaaccagggaggcggaggttgcagtgcgccgagatcgtgaaactgcactccagcctgggtgacagagagggagactctgtctaaaaaaaaaaaaaaaaaattatagttacctttacctttaactgctctatggatcacaacctggacattacacaacattaagtgttccctttgagatattccttcagactctgggaggccaaagcaggtggatcacttgaggtcagaagttcaagacagcctgaccaacatggtgaaaccccgtctctactaaaaaaatacaaaattagccgggcgtggtgacgcattcctgtaatcccagttacttgggaggctgaggcaggagaatcattcaaatccaggaggcgaatgttgcagtgagccaagattgcaccattgcactccagcctgatcaacatggtgaaaccccgtctccactgaaaatacaaaaattaaggctgggcaccgtggctcactcctgtgatcccagcactttgggaggccgagggtggggcgggggccgatcacgaagtcaagagatcgagaccaccctggccaacatggtgaaaccctgtctctactaaaaatacaaaaattagctgggtgtggtggcacgcacctctagtcccagctacttgggaggctgaggcaggagaattgcttgaacccgggaggtggaggttgcagtgagccaagatcatgccactgcacctctagcctgcgaccccctgcacctctagcctggcgacagagagagactccatctcaaaaaaaaaaaaaaaaaagaagaagaagaagaaaagaaaagagattccttcaggtcctcatggaactactgactcagctgacctgaaggaccccacaaggagctaattcccccaaaaacgcagcttctacatccttcccccaatcaatcaatgacccagttgcccaaaaccttaccctccacaatcccctaccctccacagtccccttagaaaccctctcccagaattgctcggggagatagatttgagggcctcttcccatctctgcactaggtgccctgcaccagtaactctctctgctgcatccctattgtcttggtgtaatggagctgtagctgcacagcaggcaaaggaacctgcaggtcccctaacaatgaaaggtaaaaaggagtcaccaatccaaagcaactgcaaatccagctgggaaattcctttaggcttccaggcctggaaatggttttctatggctcttttctgccctcttggctctcagctctgccctctgtgtcagccatcttttctttctttttttttttttgagatggcagtctcgctctgtcgtccaggctggagtgcagtggcgtgatctcagctcactgcaagctctgcctcccgggttcacgccattctcctgcctcagcctccttagtagctgggactgcaggcgcccgccaccacacccggctaattttttctattttttagtagagacggggtttcaccgtgttagccaggatggtcttgatctcctgacctcgtgatctgccacatcagcctcccatgtgtcagtcatcttttctaagaagccattcctaaccatccaacagaaaagctgtctccaaccccctatcactttttgtcacatcacactgtttaatttcttttcttttctttttttttttttttttgagacagagtcttgctctgttgcccaggctggagtgcagtggtgtgatctcggctcactgcaagctccgcctcccaggttcatgccattctcctgcctcagcctcccaagtagctgggactacaggcacccgtcaccatcacccagctaattttttgtatttttagtagagacagggtttcaccatgttggccaggctggtctcgatttcttgacctcgtgatctgccctccttggcctcccaaagtgctgggatttttttttttttttttgagacggagttttgctcttgttgcctaggctggagtgcagtggcacaatctcagctcatggcaacctccacccctgggtccaagcgattctccagccaatttctttctttctttttttagatggattcccactctgtcgtcaggctggagtgcagtggcgtgatctcggctcactgcaacctccacctcccgggttcaaggcattctcctgcctcagcctcccgagtagctgggactacaggcacgcgccaccacacccagctaattttcgtatttttagtagagacagggtttcaccatgttggccaggctggtctcgatttcttgacctcgtgatctgccctccttggcctcccaaagtgctgggattacaggcatgagccactgcacttggcctaattgctttttttttaagacagggtctcactctgtctcctagcctgtagtgcagtggcatgatcttggctcactgcaacctccacctccccactcaagcaattcttattcttgtgcctcagcctcccgagtagccgggactgcaggcatgcaccaccacacctggataatttttttgtatttttagtagagacagggttttaccatgttggccaggctggtctcaaactcctgacctcaaatgatccacccgcctcagcctcccaaagtgttgtgattacaggtgtgagcaactgtgcctggccttaattgttttgataatacacgttatagcttagaatagcttagctcttggccgggcatggtggctcacgcctataatcccagcactttgggaggccgaggcgggtggatcatgaggtcaggagatcgagaccatcctggctaacacggtgaaaccccgtctctactaaaaatacaaaaaattagctgggcgtggtggcgggcgcctgtagtcccagctactcaggaggctgaggcaggagaatggcgtgaacccaggaggtggggcttgcagtgaaccgagattgcgccactgcactccagcctgggcgacagagggagactccgtctcaaaaaaaaaaaaaaaaaaaaaaag

SEQ ID NO: 1894 - DNA, 148 bp, Homo sapiens
agtcccagctacttgggaggctgaggcaggagaatggcgtgaacccgggaggcggagcttgcagtgagctgagattgcgccactgcactccagcctgggtgacagagtgagactccgtctcaaaaaaaaaaaaaaaaaaaaaaaaaag

SEQ ID NO: 1895 - DNA, 91 bp, Homo sapiens
gaggctgcagtgagctgagattgccccactgcactccagcctgggtgacagagtgagaccctgtctcaaaaaaaaaaaaaaaaaaagaaaa

SEQ ID NO: 1896 - DNA, 87 bp, Homo sapiens
tgcagtgagccaagattgcaccactgcactccagcctgggtgacagagtgagactctgtctcaaaaaaaaaaaaaaaaaaaaaaaaa

SEQ ID NO: 1897 - DNA, 93 bp, Homo sapiens
aaggctgcagtgagctatgattgcaccactgtattccggcctgggtgacagagtgagaccctgtctcaaaaaaaaaaaaaaaaaaaaaaaaaa

SEQ ID NO: 1898 - DNA, 1951 bp, Homo sapiens
acagtgggttggtgcttggggccaggagggaggtgggtggggaggcaggtgcagcagcaggcagggtaaaggtaaatgaaggctgagtgataggtggggtctcagtgacagagttcgaggcagcatctaagaaagaaagaaaggtgaagcagtcctggcttgtctgggacttctttccacatgcctgtcggagagcaggctctcagcacagctcatggaggaatgcctgccctaaattgcagtggtccctgctgtccagttcccgtgaagaccaacacggatatctcaggtgagaaagaccacaagaaaacatggaaccctacttgggattttcccagagaaacccattttttcaaacaccaaaataaaaccaaagaaaacagacacctgaaacctctccagtgtgcaacaatctgtgctccttaccgctcttgtcctccaaggcctggttgaaccactgtaatgaagccttcttctctaagtctaggtcctcggcagtgatcgaatagccaagctggggaggtggaggctaccaaagtgaaaaagaagaagtcaggccaatcagaaaaaacgggaaggctaggcatggtggctcacaccggtaatctcagcactttgggaggccaagccagctggatcacttgaggtcaggagtttgaggccggcctggccaacatggtgaaaccccatctctactaaaaacacaaaaaatcagccaggcgtggtagcaagcacctgtaatcccagctacttgggaggctgaggcaggagaattgcttgaactcaggaggcagaggttacggttagccaaaatcgagccactgcactccagcctgggtgacagagggatgttgtctcaaaaaacaaaaacaaaaataaattagaaaaaaaatcagaagaaacttgtccttagcgttcctaagacttaggagagctaagccggggagggcaggagtagatggacaagaccataccaaggtcagctgttcccctcgccgagaaggcagcagctgaactttccgcttacgctgcccagagctgccaggtgtagactgagaattcgagttttgtttcttccttggggttgtatctgcagctaaagaaagaaatcaagactcgtttgcttccttccctcttccagaaatggatggttgtgtctacccacttcgcatttcacactgagttttcaatgatggtatctctgaaaagattcaatcttctatggtttggttgcttggatggtgtttgtaagattaaggcgcgcacacaaaccgcttactgtgcagtaattactgggatcacccacaggtgactcaaactgagcttacctctatccaatcgttagcccccgtctgtagcctttctccctcatcagactataaacttctgaaggagaggaaatctctctctttgtatctaacatgccttagacatagcaatgctcaagaccttttttcaataggtattaatctctacatcctccacaaatacctccaccaccaacagcagcccctcctcctggctcagcaacctacccttttctccctgggactccttgtctgctgccaatggagttgaagaactggaatgatgacacatctcttcttctctgttgggaaaaaaggaacaatttagtctagaaagacttcttggctgaagtattaaataatttctcacaccctcctaactaccaagtggccaacatctaaaacaaccatcatttaagatctcagtatgccaggataaaaaaagtcaacaggaaattccaacagaatgaagggagactgttcacagaggccatgaagacagtttttgtcttaaaacaagcacaaaacaataatcttcaaaccttacttacaacctaccaagtccctgggagttctagacacagatgtgatcctgagggagtggcattccagccaactgcaagcacctaggggatcagctcgag

SEQ ID NO: 1899 - DNA, 531 bp, Homo sapiens
tctcatttaaagcttcgacagtgtggcaatttgtgtcttacgaaatactattgcttagacttcctacatcaagacattgaattatgggttaaggtgtatgcctatatttcaaagggagagaagttgcaaagatgaaaaagattaaccctttaaaaattatcttaattaacctagggtgtatttctaattatcttaatcaacctagggtgcgtactaaacagctactaattgtacatctagcctcaggtatcttttgcagcttagacattttccattggcaaattcagacaagggcgatcttaatcaggaatatgagggtaaaagaaaagccaactgtttatctttgaaaacatattatttcttgtttcagttttccatcctcaagtaggcgctagattgtaataagtaagcagaagaagttgtgttaatcctggaactctatgcagatctggaaggcaaatagagtgactgcaaagtaggacgttctttttattcaataaaattaagaaacagcatcgtcatctcggtaca

SEQ ID NO: 1900 - DNA, 142 bp, Homo sapiens
tggccataataaagtgaatgagcatattacggctagaaagtgaacatctgttgctcattgttttaattatagccttccaatataactttatgaattcttcaaagtttcagaataagggttttaaatttgtattccagcagga

SEQ ID NO: 1901 - DNA, 2201 bp, Homo sapiens
tataagcatgctggaaatattaaagaagctgcaaggtggatggatgaggcccaggccttggacacagcagacagatttatcaactccaaatgtgcaaaatacatgctaaaagccaacctgattaaagaagctgaagaaatgtgctcaaagtttacaagggtttgtacagctagtgttcttaattatgaataaagaagacatgagccagttcatacttgtataacatgcttatttttcaaagtttgtctttaatatttttgacaccgtaatagccaagattttaattaaatcactgtatcagaagatactggagtcaacattgatataaaggattttccatttagagggttgtacaatggacttttaaactggtttatattcatgtacgttcagataaattttttaggggtcaagggaactaaaatttattgaatacctgctatgtggtggtgttctttttcttgtattaatccctaccctcaattatgtagacctttgaaactacatttgtgtttcaaagtttcacagtgttgaacacacagtgtgtgttcaaaagtttcacagtttcacctgtgaaactacaaattatttttagtagttagagaatatcagttgttttcccatgttaactattctttaagaatgttttaaaaatttttttgaaagagtcccaatcagcttaacatctttgttttttaaaattctgtggtagaatgatgtctatgataaaaagtgatcttgaaaatatttgatttctgtataggaaggaacatcagcggtagagaatttgaatgaaatgcagtgcatgtggttccaaacagaatgtgcccaggcttataaagcaatgaataaatttggtgaagcacttaagaaatgtcatgagattgagagagtaagtaccttctacataaaagttttcttgttttattctgtcgatggttttggacaaatttcatagtttttttctcttctatttctttataattcatagtaggtgctttttaaaatcagtattcacttttttcagttttcatactggaaatatagactgcattttcagccagggtctctattgtcttgtggtaagaactcttttttaaaaaactttatggaaaatttgtatcttggctatgtttttattgatttttgaaccttccaaattgctgctgccgctttagtagtacatacacagctgattaaagtactcctaggaccctgttcattgtagaatttattgatgatgccatatacccttggtaagatataaatgttggaagacttttcacaatatttcttctgtagcttatctaatttcatgctgtttgataaaattgttttcttaattctcttcacgtctgactcatttccatgactagtggttggtttttcttttttgtgttttacacagataaacatagtttatataactaatttcacatttgcaatattgtcaagtatagaataccaaagcttagttgaaatgcatcaagttcctgattgcttgacttacttgctaattgatttcttttccacataccagcatcacattgcataggattcagatttgtatcctcaaaaaaaaattatcaaatacatcttataatcctttgcaaatgattctaaatataaaaactcaatgtttaacatgtgagtctacttgcactactatgtaaataaattatgtttgatgttgtcacaatagctttaagtataattaaggaagggataatgaataaacatttttaaagcttcctttttcaacaaatgattctgtgcctgcagtatgccatatcctgtgctagacaatggctaactgtatttgcttatttgaaatgcaaaatattcctgttgaataattgtaattgtttttttaaaattttactagtttttttcatgccaaagtaacaagtattccaatgctttgattttatagttttcttagccattgctgtacttcggtataataataaaaagataattttgttagcattttatagaaatcactgatgaccagtttgactttcatacatactgtatgaggaagattacccttagatcatatgtggacttattaaaactagaagatgtacttcgacagcatccattttacttcaaggcagcaagaattgctatagagatctatttgaagcttcatgacaacccccttacagatgagaataaagaacacgaagctgatacag

SEQ ID NO: 1902 - DNA, 466 bp, Homo sapiens
gttatctgtttatttttttctcttttacttatttctctttcttttatatgtctgcctctttaccatgcactttttatacatctatcctgaaatacactatgttgcatatatttttgttttaataaaattcttctgtgtttttcatgaatatttccaattcacattttacgtattaaattagcagaaatctaattattagagataggtagcacttgatgagagaaagcaagacccctactcactcatggagatcttccatttataaatgtttacattataaacagatttggaatgttggatgtaaatatttaaatatgggagaaaaaatgttttttgaatgtagtccaatctaaatttataaactaaacagtcagtattcatttggcatattattttgttatcttctgtcttttaaaaaaatggcaaatgttggatggtgcctgcacaaaaagaaaaaatgataaat

SEQ ID NO: 1903 - DNA, 468 bp, Homo sapiens
atctgaggtgtcctttacctgcctggctggactgaaggctctcagagggaaaggccatctcgtgttactcatctctgtctcccagtggcacccagcatggtgcccaagtccctgtggaggaaccctggcttttgtgattctcaaagtcttctgcgtcggccctccctgagcaggtttgtatggcaatcacaggggccaggcaggtctcagagcaggctctctttgatggattagggggaggtggtgacagtgggacagtagccctgcctggggactctcaggccagtgaaccgaggggacagctacaagccctacaggaggactcagctcttcagcagtggacttgactgatgattgacagatgaggcacacagggtccctctgaggagggctcggccctctctcttttcaaccaggctccttggtaaagaagcgggggcgtgcgctggggggagaaccttgtgttct

SEQ ID NO: 1904 - DNA, 469 bp, Homo sapiens
atctgaggtgtcctgtgcccgtgtcgagtgtcctcaaggctgtcacagggtgaggccatctcgtgttagtcatctctgtctcccagtggcacccagcatggtgcccaagtccctgtggaggaaccctggcttttgtgattctcaaagtcttctgcgtcggccctccctgagcaggtttgtatggcaatcacaggggccaggcaggtctcagagcaggctctctttgatggattagggggaggtggtgacagtgggacagtagccctgcctggggactctcaggccagtgaaccgaggggacagctacaagccctacaggaggactcagctcttcagcagtggacttgactgatgattgacagatgaggcacacagggtccctctgaggagggctcggccctctctcttttcaaccaggctccttggtaaagaagcgggggcgtgcgctggggggagaaccttgtgttct

SEQ ID NO: 1905 - DNA, 468 bp, Homo sapiens; identical to SEQ ID NO: 1903

SEQ ID NO: 1906 - DNA, 466 bp, Homo sapiens
ctggtgcgcagagcagacagtggagggttcagtgggcagtgctcttcaccccgggtctgaataatgcccggggcttgggaggcccctttggctgggcactttctcagggtggccatgctgagctgctgacccccaagccctcctctccagctccctttcatcatcaccgtgagtgttcatttaaactcagcaagacccatgccaacaaaaacaaagaaaatgatctcttagtggttatttatatggtaaacctcctctggggtgattttttttccagtccagcttgcaataatttcttaagaaagataaagtgatttttaagtgtaattttaaggagcaggcccatacgttagcttgcttgctgttattcttctgttcatgttgttcacaacatgaactttgatttgtcttctccaggtagtttgggaccacagagaaaaatcccccttctgttaaaaaaaaaaaa

SEQ ID NO: 1907 - DNA, 500 bp, Homo sapiens
tattgccatacaaaggctcatgatccctaaggaggggagaataatgagaacaggcctaccagggagcacacacgacagacgaggtccattcaccacacagggagtgcttcccaaatattaaagtccagttgctcacttaggatggaagcaggcctctgtggaaagtgacatctgattaagtttgaggtgtgccttttatatgagtggttctctccagagatggtgtccaacacagggagggatccacggtgacatataaggcccccggaggctagaggagttcccaggggtgctggtgttggcagggcctttaggctggaaggctaacaggctaggagcacctgagctggggatctttgcagaaggggctggcagagctcagcctgctgtggctaagccctcaacgtatctgtcaaactctagagctgagatgtccactggggtgcagtagctgaggtcagtaactcctatagggtctgacagtgtgtggtgtcgcattc

SEQ ID NO: 1908 - DNA, 466 bp, Homo sapiens; identical to SEQ ID NO: 1906

SEQ ID NO: 1909 - DNA, 457 bp, Homo sapiens
  SITE (330): n equals a,t,g, or c
gtcatgagaatctccccccccggttttactcgccttagcgtccacccattaagaagccggtgttggggagagacgtcagtcatttgccccctcagctgagggttgagctctagctaagccccttcacaaaagtgaagtcaagcagtcggcttgagagtggttaggtggcagcagaaccaagcaggtgggaaatggaggaagtggggtttagttttcagtgaggaagggcagagcgttcctttgtccttcatctggccctgggcccaatcttgctatttcacttctctgaggaaatctctctctctgccccttgtccctcccctgcaaccntagatcactgcatttctagggagcaggtttgtcccttgcgaccccgagcactttctctctgcccacatccaccaatcatgatctcagatgcagctgtcactccccgctcaaaagcctgatgttcccg

SEQ ID NO: 1910 - DNA, 456 bp, Homo sapiens
ggaacggaaatcttaatttaagaagaagaataaatgataacaaggcacgtgaagttcaaatggcgtaaacctcataaaaaatgcttacgagagagatttttgcaagacagaggaggccgtgttctaaaatagactttactgagatttaacagttctgtctaatacattttattctaatatataccaactactgtacaaacttcctatgtgcctgacagtgtgcttttaataaagaattaaatcatctgaaagtacattttataatatcatggacattaattttctgtgttgtgtttccattagtccaagagccttttctgtgagaaactaatgggaagacctataattcattctaagaaagtttattctctgttattctcttattcctagttaacttcttgaaaatataagcgtttatgacaaaaataattagttgaagttatggcaagatcagct

SEQ ID NO: 1911 - DNA, 456 bp, Homo sapiens; identical to SEQ ID NO: 1910

SEQ ID NO: 1912 - DNA, 321 bp, Homo sapiens
caggattaaagaattgggaagtttaaagacacctttcctggccgggcatggtggctcacacctgtaatcccagcactttgggaggccgaggccagtggatcacctgaggtcaggagtttgaaaccaacctgaccaacatggtgaaaccccgtctctactaaaaatacaaaaattagccgggcgtggtggtacacgcctgtaatcccagctactcagaggctgaggcaggaggatcatttgaacctgggatgtggaggttgcagtgagccaagatctcaccattgcactccagcatgaacaacagagcgagactccgtctca

SEQ ID NO: 1913 - DNA, 321 bp, Homo sapiens; identical to SEQ ID NO: 1912

SEQ ID NO: 1914 - DNA, 402 bp, Homo sapiens
gctcaatatgggctagctcatttgtttgcatgttttcccacctattacaaccccaggtatcctttctaagatgtgtgcttaaatatacattgtcattctaccaccacaaattataattttaatcatacttttttaataaacaaagaaatgagtctatcatgcagttctttgcatttacaatatcatgcctgatattaaactatgaataatggatagagaaggaaagtagtagctatttaaagagttatcttggctaggtgcagtggcttatgcctgtagtcccagcactttgggaggccgaagcaggcagatcacttgaggtcaggagtttaagaccagcctagccaacatggcaaaaccccatctctactaaaaatacaaaaaaaaaaaaaacaaaaaaaa

SEQ ID NO: 1915 - DNA, 410 bp, Homo sapiens
gatacttgggaggctgaggcaggagaatcatttgaacccttgtggcggagattgcagtgagctgagatcgcgccattgcactctagcctgggagacagagtgagactctgtctaaaacaacaacaacaacaacaacaaacagctatcttgattatctccagcagtgccttaattctgtcatgaaaagcctgaaaatgctacatatataaaaaatatgcctgagcctacccgtatttatctttgactagcatattggaagtttcactaaaaatatctacggtatttacattctccaaattatgtcctaacttagttaagcaagtatttatagtaaatacaaaacatgttagtgaatgaattaactattttgtaaattcccatatgagtttttcattttcctttgaagataa

SEQ ID NO: 1916 - DNA, 18501 bp, Homo sapiens
  SITE (9022): n equals a,t,g, or c
  SITE (9023): n equals a,t,g, or c
gcgtggtggctcacgcctgtaatccaagcactttgggaggccgaggcgggcggatcacgaggtcaggagattgagaccatcctggctaacacagtgaaaccctgtctctactaaaaatacaaaaaattagccaggcgtggtggtgggcgcctgtagtcccagctacttgggaggctgaggctgcagaatggcgtgaacccgggaggcagagcttgcagtgagccaagattgtgccactgcactccagcctgggcaacagagcaagactccatctcaaaaaaaaaaaaaaaattccacactcccataaaaggaagtaaccagaaattgcattctggagtgaacccctctgagataccatctgtaaggaaatttttttcattacagtttttatatccatatgttttctatctgccagaaatgttagttgtcttcccaaatgccaaagcatgagtatgtgccctttttaaacataggctatatgccaaaaatagttatttcacaataatttctctattgtataattttacccaataagatccacatctcaactgcaaaaagccagttccacctacacaagcctttttagtttgctccctaagatagggtcatagcttagttttatagagtatcgatgaatttaccattcaacagaatcacctggagaactttcaccctctcaatgcttcattacccgaatgtttcatttcaatccttaaagggactgagaaagagaaaaaaagttactgatccatcttacacacaggcatctccatttcaacacatattattttcctcatgtcagtgggatcattgaaaattacattaagacccctccggtgttgtgactatttttgtgattaccaaggctagctctttgtgaatacctcaaatctcagactttctaccggtgacgctcctggagagatgcattagaaatgcatcctggcgtgacctttatttttaaccagggtatctgaaatacccaacaagaccatctcactttataatacaggagattatctacttagcttgctttaagtgattcaaatccaaaaatacacctatgtggaattttaggctgataacaattttataataaattttaacatatctaaaacaaatacctcctaataaatgtaatcaactcgcattttactcgggaaagaacactaagctggcaagtaagagactagattctagtcaattctagacttaagcagtcagcctctctgaacctcagttttctcctgtgacatgagatgaaatgaccaaaggaacattcagttctatcatcctgtgattggactcttgttacagtgcgtgcttgaatgtcctccaaagatgtgatattcaatacaatttgtatttatttagaagttatctaaacaccatttcaagttcagtggtgctaaatgctgctaactcacttcgtctacaatatgcaaaatgcacacatacaccgtgtctttttcaaagatgcgtgtctaaagccagtctaattaaatgccatggttaacagtgatttgtagcactgatgggttacagtcaaaattttaaaataagaatatttcagtgccagtttaaatgcccttcaggctaaataactgtgcatggcatgagctcattgatgatgacgttactcacatctgaggtataacccatgagagggaaaaattgtattactcttgattttatctagtttcatgcatccattaacttcatctttctcctttgagatgagcttggagaagtcaaatcccaccatgacaagttaggtgccaatgtgctacaaagtttaaagaaacagttacagatccaaaagctaatgtgcctctacattaagccattccttctctttcctgccttcactctcaattacggtgaaatccgaattgtgaaaattatgaagaaatgtccttccacgaggcaaacccaattcataagtgaaatattataattcagtaataagcattttatatttgaactttatgtatgtgcataaattgatactgatattcttaagagatgaagaaatactgaaaactagccattatgtgccctcagtggtgcatgccaaaaccaattttttgaggaaaaaaaataagtatgcagcatttgttatcttactgatggccaatgttcatgaacgccttgatagtgtgtctaagcatgggatcatagaccctgggcttgtggggagctcacgtactggcatctggaaggcactggcttccccacttggctatttgagtgggtgctctaccctttcaggatgaagaattgctaccatgccacctgttaccagtggaggaaggagaaggggaatgtgtcctaagtaggtgggtcaaagccctccatgtttccttgaacgtgctaaatggctctctggctctttctcttgatttctacaaagagtttcaaggagagcttaggtgagcaaggccctacttctgcaaagccctaaataggaacaggtgtgtactgctcttatcattgggcctgcatttatctcatggcaaaatctggcatgagcagataatttagagacataagttattcacatgacatagtttttgaagcttcatttttcaaagtatttaactttattcactttttggattttcttcagttcgtgttcaagaccagggcatgcaaggagaggactgtacatgaggaactggctaaaaatgtgactggtcttttgaaatcaaatgactcaacaacagtaaagcatgtcctaaaggtaagaatttaaagatggtcctttaactgtgagtactaggcatgggtcacgcttactcctggaaaatgataggagtcatggattttcatagactttttctcttgcagtttccagcataaggttcatattgaaacttagcatataaagatactaagcaaaagagatctatatcgagacaacatagaaaaaagtagagtgggccaggtgcagtggctcacctctgtaatcccagcattttaggaggctgagatgggcagatcacctgaagtcaggagttcaagaccagcctggccaacatggtgaaaccccatctctactaaaaatacaaaaacaaaattagccaggagtggtgacagatgcctgtaatcccagctactcaggaggcagaggcaggggaatcgcttgaacccgggaggcagaggttgcagtgagccgagatcatgccattgcactccagcctgggcaacaagaccagagagagagagagagagagatacatagatagatattgtatgttagaaaagaagatgcattagaaaaattgtagaacaggtaagaattgggcattgtgagtgctgaaggtgcaggggagatttgaagttttaaatagaatggtcaggatatctgatggaggaggtaattcttgagcaaaaaaaaaaaaaatttgaaggcgaagagggtgctggccatggggatgctcagagggaaagacctgtgtgaagtcatcaggcagcagcatggctggtgtgtctgcaggagacagggaggacactgtggcaggagacagggaggacactgtggctggagccaagtgagcagaaagaaaaaaaaaagatggacgatgaagtcatggaagccactggaggcttgggagttagcataggccaggcgttcccactcagagcagaactgggagttgtgtcgttggagggttttgcacagaggagtaatgttttaaaccaagctgaccttggtttaaaaggatccctctgattgctgtgttgagaatcgactacagtgggataaaaatggagaccacaaccacttgaggggctatcagagaagcaggatcctctggggagagtcactgctcagttaaaatatggagtgaagggaatgctcggagaagaattgcatcttcaagagattgtgctaacgatggaccatgtgctctggaaggtggggtgggtgggtttcaggagattggaagcagtggaatgtgcagatatataagggaatatgtggagagggcagtagaggagttgaggcttcatctgtcatcagacgtgaacaggcaaaagctcaatttcattagtgctggtggtttcaaggaaaatagtggaggcaggccagagtgctaagggatggagaggggtaggagtctgttgaattaagagacaaatgttggaacacttgacacgatggctcaaaatattttggacaagattagggaaagaggattgcagcagtgtgcctgggattcattcatattcctaacaacatgtttcacttctaatagccattagaatgctattggagtgctagaatagtattggtagccatttccatttcttcttactaagaagtgaccacttcattaagccatagctgcctttgtagaatatcaatcccttctcttttttatctgagtcagtcttctggaattaggactgtcttgtcaaaagtttatcgcagcattgtttgtatgacttaaaacaggatataatccaaatgcccattgacagtagagcagataagtacatggtgattatatatgtcatgtggtgaccatatgtgatccccccagctacgtgcttcaacataaacgaaccacagaacagaatttgttgaatgaaaaaggcaatctcagaagaatacatagaggatagttccattcttatgaagttcagtggccagatgaactaaatatcccttcattgtataagtattcgtagcaaaattgtgaagtaaagcaaaggaatgattagcacaaaatttaaaactgttatctgtggtggaaggagtaggaagcagagaggatgcaaggggtgcgttcttgaaactatacatatacaatatgactttttgtagctgagataagtgtcacccttaggcccaagaaagaagggtgcccatcctgggatgagctttgttcttctcatactgcacctgtcctcacaggccaaggtttaagaggagctaagagaacaagcccaccaggagcccctacctccccttctagacctgtaaggaaccccaagaccctcttgctcaaggtcctataggtggatttccaggcctgcttcaatctctgtcccaagccctccaggacctccagaggacaggtcttgatgcctgagtgcaaccctagaccccattaaggagctatttgcggcagggaggagggccaggttgtggacagcactcagatgtgcaggctggacagtttccaaaagagctcaggcgtacaaggccctacctctgcaaagccctaagtaggaacaggtgtgtactgctcttatcattgggcctgcatttatttcatgacaaaatctggcatgagcagataattttgagattgagttatttaggtgacataagttttgaagctttgttttttaaagtatttaacacatgcgcaccaggcccctcaaggggcaggacggagccttgggcgagaagaaaaggggcaggccaggccctgtgccccccaggacctcacaccctggggcagcattccaaggtgttatgaagttttgtttctcgaggtaggaggatcaaacatattttatttaacacattttcagcttgacttccaacttctagatatctagacatatgaccttccattttcacccttacctctaacctttgaaatttgaggggtgagcttggtacaataaaaagtttgtttaggtcaggcttggtggctctcaactgtaatcccaggactttgggaggctgaggcgggaggatcacctaagcccaggagttcaagaccagcctgggcaccatggtaaaaccctgtctctacgaaaaaacacaaaaagttagctgggcatggtgaccacatctgtagtcgcagctgtccgggagactgaggtgggagaatcacctgagccggagagttcaagactgcagtgagctgtgattgcaccactgcactccagcctggcaacagagtgagactgtctcaaaaaataaataaataaataaataaataaataaaagtttgtttagttttgtttaactaggtgaaacaactagaacatcccttgaataaatattttgtaaaacaactgcttagtcagtcatgccaaataaacttgtaacttgttttagtttaaacattttttgagaggattgagataaaaatcatcccactataatagagaatattttactgctctaattcatttagtttcaaagaatacattttaacataacaatgttatagtattacatattgcaaagaaaaaattatcattattttgccataggataataaatgtctcgttgccttttttttcccaacagcattcctggttcttctttgcaattatcctaaaatcgatggcacagcacttgattgacacaaataaaatccaggtaagaacataagtaatataatattataatatttttacaatattatccaacaattacactaatgattatgctgtcatgagttccatttttatttgctttataaaccttagcagtttacaataattactttataagtagaagaaatgattgtgtacaccaaccggcacaggcccttcagaagcagatgccaagacaatattggaagtgcaaaagatgtattggagggaaataactataaaggataaaaggaacaggaaaaagaaatgggaaagtctgatacctgtaaatgaaaagggggaaggaaggaggattggctaggaagagtctcacagtgacaaggttttagctgggctgatgggaagtctgagagcaaagagttgtcattagaggaaccctgcactgggaaggccatcggcctccaggacctttgcaagctaagtcgttgactgggagcagcctggggggagggtagccttggcatgaatgctggagcatattgcaagatacagcaactctttatattcttcccactagattctgtcttgaaggaacatttgagcgatgtgcattcctggctgccacagtccaagtttgcatgacatattgtacaagttcatgaatctgcttccctgcagttcccatgggcctcccctcctgaaaggaagcttagaagagggaccctgatggaattaattacagccccttccatggcttttcaggagcctatgtattactcatcatctcccatcccaactctccattctagatccctctcactctaactagcagctccgaaggtcttggtgactcacctggtgatatgacccaaaccctcattctagagtggtctcagcctctggtcatcatactctactcacaccagagttggtacctatggccattcacagttacaatggagtgaggaagaccaagaagcagccaggtagatcacctgagttccacacacatttctctgagcccccattgtgggtaaggccaagggaagacctctggcattgcccctgccccacgtggagggtaaatcataacaatgctgcatgaggtggggttggtggtgtacagttatattattttgatttactcttttggtggggaagaagcagtgtcagaagctcccacctggcctcccccactaggatacctccacagaccaagcacccgtgcaagcttactccaaatgccagttttattaatacaaattatacatttgggaccagttacatgactattggggggatctttgaacccagtggatctactgttaacagaactttagtcaggactccacctttaatccctgtaagtccccactctatcagggcagacatggtgatgcttttcatttctggatatcaatgtcaactcagattctgtgtgcaacagtccttgaactatatgcccttcttctcagtgtacagtagcctgagtaaatggctatagggccctttggagaagaattgatagactcattacagtatgtatctactgcattgttgcagtgggggctttcctttagggaccccatcacctcttcagtcaatgtgtaccagatctgaattgtgactcaggtccaggaacagacaaaggaaccatgactattcattggaatgaacatccccatcttccagttgcccattcttgccttctttgttaatatgatgtaccaccattgttggttgctctctgttttgtccctaggagttccagtcatcattaaccagctctacaactccctgagagtcggtccctcttggcttccccaccagtcttgtcatttgtcatgatactcacagccccctggctcctggagattaagcacagcacatggcctctgttgttttggtgatccctgatccccatggctgctcatgagccaagactgtgactgctcctcctgccaacagatgggaaacacccctgaccttcttaatgatattggtccccagcaccttcttagtggccatggtgcatgctgtcttctgggcctgcctggggaacttgatacactggtggatcttccagtctcaattaatgtccattcctgtatatccacctccctccacctctttattttttcctctatcctctgccaggacaaccagacatttcgactttgcttaaagtaggccatctctagattctcagagcaaccctagcagtgagttgctcatcccgtgagtccttatttaatcccatgttctgaaaaagcacacccatgtcaatgcattctaagttacctgcccttactttctggcccacatcctcaatgtacaattgcagaggttctgccctacctcctggtggtacatgatagctaatttttatagcctctttgggtatattctctttcctgctttattaggcccagcaagcccccagctgggttaagctaggatttaacctccaggtattgccctgatcaccagaaggagaggcgggacaactcctcaagggtttgcctgatttctagcagggagaggcctttgcaatatcatcttgcatgggaggagtgctgacacttaatagggaggaattaaacttctgctagcactaaggcttcagggaagtgtgcagagccacttcctcagagtcatccatccagaggtcctcatccatgcttctaggccccaggtctatgtaaccatggcnntgatctagtatgacagaaatggcttgctggacctttaatcatctgtggagttccataactcttaactcgcaaatcctatttttgcttttctgctatttctgctctccacttctggagatgagagcctcctacctgggagggagagaaaatctaacacaaaggtaaaaatggttcgtatctctctgttgttaagctctactggggtcaggaaacctcactgttgcaattcctgctctgtcactaacttgttagctgacgaaaacgacgcttaacatctcagtgcctgttttctcatctgtaagaagagtggattggactaaaattctcttctagttcctaccagtatgcatctgcttgtatagacaggtcacaaaacacacctgtgagcagcctaagaataaatgaactgataatagccagcatgattgtgtccagcagtttatcttctccgattgaggtttgctttccgtgacccctttcagtggtaaccctcacaccctagttttctttcaggagccctgcaccttccactctaaccatctctaatcatcacagtgggaaaagacctgatatcatcttttttctttactttttttttttttttttgagacggagtttcgctctgtcgcccacactggagtgcagtggcacgatctcggctcactgcaagctccacctcctgggttgaagtggttctcctgcctcagcctcccaagcagcttggattacaggtgcatgccaccacacccagctaatttttgcatttttagtagagacggggtttcaccatgttggccagactggtctccaactcctgaccttaggtgatccacccacctcagcctcccaaagtgctggaattacaggcatgagccaccacgcatggcccatttttttttccccttgatacacggtctcactcctgttgcccaggctggagtgcagtggcacaatcatagctcactgcagcctcaacttccccaacttaggtgattctctcacctcagcatccctagtagctgggactacaggcatggccaccaagcccagctaatttcatatagatgattgatagatgatagatagatagatagatagatagatagatagatagatagatagatagataattatatatatttagtaaagatggggtttcgtcatgttgcccaggctggtctcgaactcttgggctcaagtgatctgcccatctcagcctcccaaagtactgggattacaggcgtgagccattgtacccagccctgatattatcatttgacaccaaagcattcacagtaaacttttcccaagctatttgtattttcttttttttttctttttaaattgtgaagtgaatggttttctccactattaaaggaatttccatcatccaaggagtaagtgtggaagatctgaggaagtcaggggagatatctggtttagtcctctaaaaggtgcaatgttgttgggcacttggccagcgtgagttccagtttcctgggaatggctgggtgtagttgctcatgcctgtaatcccagcactttgggaggctgaggtgggcagatcacctgaggtcaggagttcaagactagcctggccaaaatggcaaaaccccatctctattaaaaatacaaaagttagctggatgtggtggcacacacctgtaatcccagctactcaggaggctgaggcacgagaattgcttaaacccgggaggtggagtttgcagtgagctgagattgcaccactgcactccagcctgggccacagagactctgtctcaaacaaaacaaaacacaaacaaactaaaacaatttcctgggaaccactgaatgttttctcaacattattctctagtagcaaaaggatcattgaaccagctaaaccttttgtttcccatcatcctccttgtttctaacaaaactcccaaaagcctacagttctgcccatgcatcccaggcctgttccccttgacctcgccatgctgtagctcagattcatcatggtccagctctgcagcttgggaagtgtgccaccatctcactcccttcatctcctgagacaaaaaattcacaatctccagtgcaggaattcttccacctcgagtctttaggatatacttcgggaaaacagttttaaaagtactcatatatttattaggcagacatctttgggttcagagtgagagtaggccacaggagactttgagaggaaggtgtaaagaggaaggaacaaatggaatattaaagcccaaggcattcatgcatatgcatgtggggaaaatgtacgtatgatatgcttaaggaattttagaggactaacaaaacgaaaattgaaaattaaaagtgtgctttgattctttaaaaggtgactgttgctttttgtaggtgaattgtttacctttattacccaagttttatggaagagaatttaaaaatgctgtgtgtgatcaaatcagttaagttcattagttgttaatttatttgatttcaacaataaattttaaatatatagagagtaaccatgaaattttcaaaaatatccatgcagtgatgtcctggtaaagtggcttaaaaatagaagccagtctggccaggcggggtggctcaagcctgtaatcccagcactttgggaagctgaggctggtggatcatgaggtcaggagtttaagaccagcctggccaagatggtgaaaccccatctctactaaaaaatacaaaaattagccaggtgtggtggcaggtgcctgtaatcccagctactcaggaggctgaagcagagaattgcttgaacccaggaggcggaggttgcagtgatctgagatcgtaccactgcactccagcctggacaacagagcgaaactccatctcaaaaaaaaaaaaaaaaaaatagaagccagcctaaaccagctccaacatcccgttaaattccattaaatatctgtttcatacaactcctgtaacttcagccttcatgatttttatccttgcagcatggaagtctgggtgctcacaatttagaaatacacagttcagtgtaactctaaattccatgattctatctatagtgaaaatgtgtctgggtctaatttttaaagccagctggtaaagatgaatgaatcttatcagaagtaaggctgggcacgggggctcacacttgtaatcctagcagtttgggaggccaaggcaagcagatcacttgaggtcaggagttcaagaccaacctggccaacatgacgaaaccctgtcactactaaaaattagctgggtatggactacaggagggcgcctgtagtcctagccacttgggaggctgaggtgggacaattacttaaactgaggaggtagaggttgcagtgagctgagatcacaccattgcactccaatctgggtgacacagaaagaccctgtctccaaaaaaaaaaaaaaaaaaaaaaaagcagagtctgagatggaagaactcggctgcctcaaatgttcccctcatatgcaggagtccaaacaggagggatggatatctggacctgaaatggtcttttgagatccatagagctttattcagtggatgtaatgtcatctcacagccaagcccttctttatcttgacttgtgaggtcccactggtgtctcttaactgtggcatatactgggaccagggagttaaaactagctgggactcaccaaatgtcagaggacatttcaaaccaatatctgtattcattcagttattcatttattaatttcttagactagtttattgggggcattcctagttgtaaaaaaatcaaaataatttatttttaaatgaaatagagaactacatgtccaaaatatctagaataatgttcattaaccattaatagtagctattccctgagagggaaggagggaaagtaagatatgagaggccacagagaaggttcacattttactttgtacattgctacattgtttcaatagtttgcaattaatatttgttatgattgacttttattataaagtgaaaattttattgaccaaaattgaaggaaacactaaatattaatgatggaaatcatgaccttgaaagtaaaaggcttctattttattactgctttcaagttttcaaaaggattctttttctttaatgacctataaaataaagtaaatatttcagttgatacttcctcggcttaatatttcacatgccacattagaaagatataatccgttctttccttagcttccccggcctcagagatttcctgaatcttaccaaaatgaattggacaatcttgtcatggtcctatccgaccatgtgatttggaaatacaaggatgcacttgaagaaacaagaagggcaaaccacagcgttgccagatttctcaaggtacagttatatgagatcgcagttctattcaaggccccatgttggtggatgcaagatagtctaaactttcatcagttcacatcttcatgtatgatgaaaaatcaaaactagcactgtcagatgaaaactttcatttatacatctttattgcttgaaatactttttaattttttttttcaatttgaagtcttattgaataaagactaaggttagaaggccgggcgcgatggcttatgcttgtaatcccagcactttgggaggccaaggcgggcagatcatgaggtcaagagatagagaccatcctggccaacatggtgaaaccccgtgtctactaaaaatacaaaaattagctgggcgtggtggtgcgtgcctgtagtcctagctatttgggaggctgaggcaggagaatcacttgaacctgggaggcggaggttgcagtgagccgagatcacaccactgcactctagcctggtgacagagagagactgtctcaaaaaaaaaaaagacaggaagaaagaaaaaaaaaactaaggttagagaaaagtatccatttgagtgcagtcaaatcatagtatttctaaatatattttaagagaaaaaatgaaatttttaaaaaggaagctgcactacagtaatattattctcttggacatttctgcctttgaaagtgatgttataatggctttagctctgacagtgataccaaatagccactttgggaaacgcttcaggaatttagcatttttgtttattatctccaggctcttttttttctttatttctttttgagacaggatctcactctgtcaacccaagctggagcacactggcatgatcacaactcactgtagcctcaacctccctgggctcaggcgatcctcccacctcagcctcctgagtaggacacagacacaaacctggctaatttttgtattttttgtagagacggggttttgccacgtagcccaggctggtttcaaactcctgagctcaagagattggcctccctaagtgctgggatgacaggtgtgagccaccaaggttgacccacgctgttttttacattatggaaagatcacactgatcccatgaaagaaaaattatcaagtaaagtattgagtagctacttactaaactggatatgtatggaaattagttatatttcattgggttacaaccatttatattgagctgagaggaaagaaatgcaaagtcgaagaaaaaactaagatacataattacagtataccatttaacagataatgcaagcaattagaaagataatagttttctgtgcctccttctttagtctaactcttgactactataacctttatgaagtcatttgacttgtttcttaatggtagtcaccagaacatatgggtgagtgtgagaatgtataaataaatgctaataatatacagttaaaagcctatagaagtggaaaatgggcccaacttgtcactggtgagctttaatccagcctaatttcttttttttaatgtgttaaaaactatttcaaattatacactgtatgtgttcttatcctgaatttatttttttcttcaaggttttgtctctgatttttacttttttcttgcttccagaaagagacaagaatgataagtgttaaaggggaaaagtttaaaggggggaaaagttactgtagttttctaccacattttaagacctatgggaataaagtttattgctatgctaatagtttactaggaaacttagaaagaattatgtatagttcagtttgcaaataaaatatattgaaagaaacatctgaaatattcttccctaaactgcaaaaaatgacgaataagcaagtctctaaaaaagggaaaagacctcatagttaccctccttattactaatttgaagttttaatggcatttatttgacacataatattaaaaaaaattggaacacttattagatgaatcatttgagctaggagagaaaaaaaagaaaggaaaagaaagtgatttttgaaaatgtaaaactgaacgtagtcatttggtgcaattccaataaatttgagttttcagatgctcaacacagcccactcctagtgctgatgtcataaatctcttatatttccagcaaacaatagttatttgctcaattggggcttcaaatgactgctacctctttttgttattgaagtctacattagcaaatactgtgaattagtcaacattggaatttaacaattaaaatattattgtaactccatgggttgctcaaaattggtctccaagaatcaagaagaacctctgggaaccagtgtgtgggcatataaaaatgttctacattaaaaggtagcctcccttaccccacattatgggaaagtaatattttttcagcaattatgccaaaaagcttgtacatttctcaactattctctcagtgaagtaaataggattcaaatgattgcagcttttgtcatttttctttttgccacccacctgggtcacagctctacttatctgaacatacctatttagacactctttttatgaagcacaataccaagatggtagcaaaggctgattcattctgatttttattttgctgattggatagccgtatcttttagcccattcgcctgactaaccactgctttgtttcaatgagctgttgaaaaccatttggaaatcacctaatattagagagagacttggtttaaacatctgtggtatttctctctaaatatcagataaggatggataagcaagtctctaaaaagtgaaaacccttcatatctactctacttggcttaaatagcttgtgcttttggaataaatgaatgttttccatagagctcttggtccactctccatagcaagattttatgtgtagtcctgtctgtgagtaaaattgaggagagactccaagaaatgcaaaaccattttaatggatcatcctggacactttcgacaagaaagaagcactccacaccagctgtggaattttcccaagcagcatgtttactcacacccacgtgggtgaatagaatgagactcacacaccaagtaatgagctgcagatccactatgggaggcacctgctctagtgcctccccagatcctgcgttgggaactatggtcccttcctcctgctccacactttgcctgtgcagtctttggccgtggtagcttggttactggttacatgaccatccgtcttttggagagagagcaagtgctcctccaagcctacttactgtttaagactctccttgatacagtaaagagaatttgaccacagaataagaaaggtagtaagcagctcgctgatagaaatcttacgatctccttccttcagccttcaaatgcaagcttcctcagctgataaggagaggagctactctgtcaaaaggggccagtgagatttaaaaggctttcctgactcgtctctaccactcctcattatgacccagtgtgtacaggagaagatttacaaccccataagtgtgaaatggaattattaaaagaaaataataaaatgtaactaagtggttaaaaaagtagacaaccgaaagctaaagctttctgtataaaaaagaaggggctataatatttcattgcaaagctccagtgacattttataaaatcaatatagatttataactttctgattgatatttttgttttattcatttatgctttcattctgtttttcctttcaatttttcttgttttcttctgaatttttaaatgtacctattctctgttagtatattgccctgtttcattttcatttttaatataaattgtagttattttagttgccatatgtggatgactgcttaaacatctttagaagattttttaaatacctaattatacaacacatttagtttagtgttattttacttcaatatatttaatcatattttctaaaatctttaatgattcttcaagtaaaagtgtttaaatttagaattttatctattttagcgctgctttacatttatggaccgagggtatgtgtttaagatggtcaacaattacatcagcatgttctcctccggtgaccttaaggtaagaaccacgtacaggagtgattgttttctaaactatggcattgtaaataaataaagtagtctctgtggatacctgcttaagtccattctctgtatcagaaagtgatttctatgccaaggagaggcagccttttaatgtttcatctgctgagtgtgcctaccaagtccttccttaatggggacaaaggagagtggaatgaaagtgtttacatttcatttctatttcctgtgggtggtgaagagaatggctctttgcagctacaattcctacagtccagtttgccctagactggcttggtttcagcactgaaagtcctacttccctggaaacctttaagtcctgggcaaaatgggacagttgaataccctacccaaataggggtatacgctggggagatgtaaagagaactctagagcagtggttcctagaccagagaggtagcatcacttgggaactgaactgctgctaatggagcccagaaatttgttttaacaggacctctaggtgattgttttgcactctcaggtttgagaaccactgagctatggttatggcatatgctggagggaactaagactggaaatgggccagatgatgaaagctggatcagttaactgttctttgggttgaaagcaacagaaactgactccaatttgagcaaaagggaattgattggaaagataattgggagtaaatagcattgatgaagcagctgcagaagcaggctttgaaaagagcaggggctggcagggcgcggtggctcacgcctgtaatcccagcactttgggaggccgatgtgggcggatcacgaggtcaggaaatcgagaccatcctggctaacacggtgaaaccctgtctctactaaaaatacaaaaaaattagccgggcgtggttgcgggcacctgtagctccagctactcaggatgctgaggcaggagaatggggtgaacccgggagtcgagcttgcagtgagccgagatcgcgccactgcattccaacctgggcgacggagcaagactccgtctcaaaaaaaaaaaaaaaaaaggcagggg

SEQ ID NO: 1917 - DNA, 517 bp, Homo sapiens
tttttttaaaaaatttagtcatagcattctggaaaaaaatgttacttttggcattgaaatgtttccagtatctttctaactcacaggcatattactgacctctttctgaatgagggtttgtagcctagtttttaaagcagagcctgaaattctggacaatttaaatatctctaatggcttcacaaccatccagttctggacctgcatcaaaagtccccagctgtgccttcaactcatgctcttttcagcatgtgaatgtgtctctgtgttggcaagactcctagatattgcagctgatagatctgttgaaattctgagatattcctaagcactatagccatggagcagctggtagtgttaatgtgaaaaaagatccacctgtacatcattgctgctagaaaccccaacccagctaagggaaaaacaaagcaaaacaaaacaactgcatcttaacctaattactttttccaaaagcatatatagtgcctataggttggaaggcaagccctcttcaaat

SEQ ID NO: 1918 - DNA, 4418 bp, Homo sapiens
tgtcatcataggacccagcaaacaggttagatcatgtttcatgtaagcgctccctgacaatttttagaattgtcatcgtcacacatggtgaaagtccactgatgaggtcataattctcatgcacagatgcagtccacagttaaaattgtaactatcatatgtaaacgtggccacagttgagatggtgactcatttctaaacccagctcataggtgagtgaggactctcctctctggacccagccaattgaagagatgttgacccatacctagacttaggaccacataagatcatgggtccaaagcagcgcaaagttctcagagtaggttgcaactcatacagtcctcaagagagtgcccttacagggccaagcacacaggtgagattgtcaaacttacattcacacccagtcaatagcaaagattgtcatttacttaaacacaccctacttttgaggttctgaatctcacttttggaggcagttgaatgttggaaaattgactctcatttgtgtggattttgtccacatttgggtgactctttaatcaaaattcagcacacctttgtgactgtaacttcactaaggagctttatttatttagagatgaagtttcattcttgtaacccaggctggagtgcggtggcgtgatctccgctcactgcaacctctgcctactgggttcaagcgattctcctgcctgattctcccaagtagctgggattacaggtgctcactaccatgttggctaattttttgtatttttagtagagatggggctttaccatgttggtcaggctggtcttgaactcctgacctcaagtgatccgcccacctcggcctcccaaaatgctgagattacaggtgtgagccaccgtgcccagtctaaggcacacaatttgcaaaggaaattgaggctctcgcacaaatccagtccaccctgtacttacacccaacatgcaggaggtgttgactctcatcccttgactcaggacatgtgtgtaattgttaatgtcatcgcaaggccttttgacaagtgtaattgtgacatataccttggcctagcatctgagttatttgttgtttcctgggtccagctcacagtgccatatcactggatccagacccttggtaatgtgattctattctgccttgatacagcccacaggggtcattgtgacatcgctgggcattgcacctaggtgatttgagtctcctcttctgccttggtgctgcccacaggtgtattgtgacatattgctgggcgtatgttatgtgactcttgcttgtgccctaaacacataggccattgtaacattgctgagtgcaacacccaggtgatgtaacgcttcaccctggacctgtctacagagggcattgtaatatatgtcttcaccaatcacccaggaaatgtgactttttattcctccctgttctgtactcacagggggtattgggacatattgggcccagcacctagctgatgtgacttttctttattctaggttctgacaacaaaggagattgtgacatattgctgggcctaacactaaggtgatgttagttatttgctttggctgtgcccttggaaggcattgagacatactgctgtgcccagcaccaagatgatgtgagttccctgcctgaaccctgatcacaggaagcattgtgacctatctgttgacccactgcaatctctcctgtgggaaaagcacagataaatgccctcttttacctacgtgatttgacactcctctactgcctgggccgtgcccacagaatagagagtgacttatcactggaccaagcacaccagtgatgtaattattctgcttggtccttgcacacacaagtcactgtgatatatgtttgggcccatcacctagatgatgtgactcctcttctggggtccacagtgggaattgtgatacatcgcttgacgtagctcttatgtgatgtgacttttctttcatgcttgggcccttcctactgggatgattgtaacataaagctgagcccagcacctacgttatgtgactctcctcttgtttatgagccctacccgcaggaggcattgtgacatatctttaggcctctcacttaggtaatgtgacttctttgcctaggccctcccctccagaaatatcatgaaatatttctggaccaagaacctaggtgatatgactctcctcttctgcttgggacctgcatacattgtgtgttgcaacatgtctctgggtccaacaccaaggtgatgtgactgtcctgcatggatgctcccacggaaataacacatctctttattcattatctaggtaacgtgactcttctgcttcaggcctgccaaaagaaaagattgtgacagatcactggacccagcacctaggtgatatgactctcctcatttgcctgagacctgcatattttagacattgtgatatacaactggaacaaacacctaggggttggaaggctcctgcctgagtccctcccacaggaggccttgtgatgtttttttgtttgttttttgttttctttgagatggagttttgttattgttgcccagactggcatgcggtggcgcaaccttggctcaccgcaacctccgcctcccgggttcaagcagttctcctgcctcaacctcccgagtagctgggattacaggcatctgccaccatgcccggctaattttctatttttaatagagacggggtttctccatgttggtcaggctggtctcaaactcctgaaatcaggtgatccacctgccttggcctcccaaaatgctgggattacagttgtgagccactgcacccagctttgtgatgtatttctgcatccatcatgcaggagataaaactctgtatttttgcctgcattctgcccacagggaagattttgacatattgttgggcccagcaaccagtcgttttgtctgtcatatctgggcccagcacccaagggatctcactcttctacctgtgccctgctttcaggagggattgtaacatccctggtcaagcccccagtgatgtgattctcctgtttgatgcctgccctcagggaggattgtgacatagccctggcccaacacacagttcatgtaactcttgaatttgctctttacatacaggtaggattgtgacatatatctggccaagcgtacagatgtaatgatgactgtcataccttgaagaagccaatagcagagagaatgttgctctcaggcttaggaaaatgaggaagtctttctgtacaaaagtcataaagaattactactctctcacatatattacgccctagtgtgttacagagaatgtcataacagggcccagcacacaagtgagattgtgtttgtcctatgcacactacaccaacctttacagttgtcaccctgacccattgacagagtctgctagtgaggttctgaattacatgtgaacacagtccgcagttggaattgtgactgtcatatgtgaacatctggctacagttgggatggtgactcatttctaaatccagctcataggaaggtgaagactctcctatctggactcagttggtgagagagatgttgactctcatatctgggcttagaaccacaggaaagattctggagctccttgtgcaaaggtcatagaggattatcaatcttgcatattgtataaagtcctcaggtgacacagagtgtctctcgaatgcacacccaggcaacagtaaagattgtcattctcccacataaacacatcccactgttgaagttctgaatttcacagaggctgtcaaaagttggataattgcctctcatgtgtggatctggtccacaggtgggttagtgacttccagaccaaggttcagcgcacatgtaaggctgtgactacactaagaagatacagtctgcagaagaaactgtggctcttttgcacacattctgtcaatcattgtgattgcgactcatgtacttagacccaacatacaggaggtgttgactttcatacctttagaacctggacatgtttggaatttctaatctaatccctggactttcctgcaggtgtgattgtgtgcattgcaaagcaccttagtgatttgactctcctgccttggccaagcacacaaatgagattgtgacatatggcttgactctgaacctccaagatgtgactcttttttccagccttggagctgcccacatgttgcattgtgacatattcctaagccctgcactcaggttatgtgactctccttttttgcttaggccctgaatatttttcatgttaagacatattactaggtccaacacctataaaatgggagactaccacctgggctctttctacagagggccttgtgacatacctctgcatcaataacctaggagatgtgatgctccatttttgcctgtacgtgccccacagaa

SEQ ID NO: 1919 - DNA, 4418 bp, Homo sapiens; identical to SEQ ID NO: 1918

SEQ ID NO: 1920 - DNA, 8191 bp, Homo sapiens
tgtcatcataggacccagcaaacaggttaaatcatgtttcatgtaagcgctccctgacaatttttagaattgtcatcgtcacacatggtgaaagtccactgatgaggtcataattctcatgcacagatgcagtccacagttaaaattgtaactatcatatgtaaacgtggccacagttgagatggtgactcatttctaaacccagctcataggtgagtgaggactctcctctctggacccagccaattgaagagatgttgacccatacctagacttaggaccacataagatcatgggtccaaagcagcgcaaagttctcagagtaggttgcaactcatacagtcctcaagagagtgcccttacagggccaagcacacaggtgagattgtcaaacttacattcacacccagtcaatagcaaagattgtcatttacttaaacacaccctacttttgaggttctgaatctcacttttggaggcagttgaatgttggaaaattgactctcatttgtgtggattttgtccacatttgggtgactctttaatcaaaattcagcacacctttgtgactgtaacttcactaaggagctttatttatttagagatgaagtttcattcttgtaacccaggctggagtgcggtggcgtgatctccgctcactgcaacctctgcctactgggttcaagcgattctcctgcctgattctcccaagtagctgggattacaggtgctcactaccatgttggctaattttttgtatttttagtagagatggggctttaccatgttggtcaggctggtcttgaactcctgacctcaagtgatccgcccacctcggcctcccaaaatgctgagattacaggtgtgagccaccgtgcccagtctaaggcacacaatttgcaaaggaaattgaggctctcgcacaaatccagtccaccctgtacttacacccaacatgcaggaggtgttgactctcatcccttgactcaggacatgtgtgtaattgttaatgtcatcgcaaggccttttgacaagtgtaattgtgacatataccttggcctagcatctgagttatttgttgtttcctgggtccagctcacagtgccatatcactggatccagacccttggtaatgtgattctattctgccttgatacagcccacaggggtcattgtgacatcgctgggcattgcacctaggtgatttgagtctcctcttctgccttggtgctgcccacaggtgtattgtgacatattgctgggcgtatgttatgtgactcttgcttgtgccctaaacacataggccattgtaacattgctgagtgcaacacccaggtgatgtaacgcttcaccctggacctgtctacagagggcattgtaatatatgtcttcaccaatcacccaggaaatgtgactttttattcctccctgttctgtactcacagggggtattgggacatattgggcccagcacctagctgatgtgacttttctttattctaggttctgacaacaaaggagattgtgacatattgctgggcctaacactaaggtgatgttagttatttgctttggctgtgcccttggaaggcattgagacatactgctgtgcccagcaccaagatgatgtgagttccctgcctgaaccctgatcacaggaagcattgtgacctatctgttgacccactgcaatctctcctgtgggaaaagcacagataaatgccctcttttacctacgtgatttgacactcctctactgcctgggccgtgcccacagaatagagagtgacttatcactggaccaagcacaccagtgatgtaattattctgcttggtccttgcacacacaagtcactgtgatatatgtttgggcccatcacctagatgatgtgactcctcttctggggtccacagtgggaattgtgatacatcgcttgacgtagctcttatgtgatgtgacttttctttcatgcttgggcccttcctactgggatgattgtaacataaagctgagcccagcacctacattatgtgactctcctcttgtttatgagccctacccgcaggaggcattgtgacatatctttaggcctctcacttaggtaatgtgacttctttgcctaggccctcccctccagaaatatcatgaaatatttctggaccaagaacctaggtgatatgactctcctcttctgcttgggacctgcatacattgtgtgttgcaacatgtctctgggtccaacaccaaggtgatgtgactgtcctgcatggatgctcccacggaaataacacatctctttattcattatctaggtaacgtgactcttctgcttcaggcctgccaaaagaaaagattgtgacagatcactggacccagcacctaggtgatatgactctcctcatttgcctgagacctgcatattttagacattgtgatatacaactggaacaaacacctaggggttggaaggctcctgcctgagtccctcccacaggaggccttgtgatgtttttttgtttgttttttgttttctttgagatggagttttgttattgttgcccagactggcatgcggtggcgcaaccttggctcaccgcaacctccgcctcccgggttcaagcagttctcctgcctcaacctcccgagtagctgggattacaggcatctgccaccatgcccggctaattttctatttttaatagagacggggtttctccatgttggtcaggctggtctcaaactcctgaaatcaggtgatccacctgcctcggcctcccaaaatgctgggattacagttgtgagccactgcacccagctttgtgatgtatttctgcatccatcatgcaggagataaaactctgtatttttgcctgcattctgcccacagggaagattttgacatattgttgggcccagcaaccagtcgttttgtctgtcatatctgggcccagcacccaagggatctcactcttctacctgtgccctgctttcaggagggattgtaacatccctggtcaagcccccagtgatgtgattctcctgtttgatgcctgccctcagggaggattgtgacatagccctggcccaacacacagttcatgtaactcttgaatttgctctttacatacaggtaggattgtgacatatatctggccaagcgtacagatgtaatgatgactgtcataccttgaagaagccaatagcagagagaatgttgctctcaggcttaggaaaatgaggaagtctttctgtacaaaagtcataaagaattactactctctcacatatattacgccctagtgtgttacagagaatgtcataacagggcccagcacacaagtgagattgtgtttgtcctatgcacactacaccaacctttacagttgtcaccctgacccattgacagagtctgctagtgaggttctgaattacatgtgaacacagtccgcagttggaattgtgactgtcatatgtgaacatctggctacagttgggatggtgactcatttctaaatccagcttataggaaggtgaagactctcctatctggactcagttggtgagagagatgttgactctcatatctgggcttagaaccacaggaaagattctggagctccttgtgcaaaggtcatagaggattatcaatcttgcatattgtataaagtcctcaggtgacacagagtgtctcgaatgcacacccaggcaacagtaaagattgtcattctcccacataaacacatcccactgttgaagttctgaatttcacagaggctgtcaaaagttggataattgcctctcatgtgtggatctggtccacaggtgggttagtgacttccagaccaaggttcagcgcacatgtaaggctgtgactacactaagaagatacagtctgcagaagaaactgtggctcttttgcacacattctgtcaatcattgtgattgcgactcatgtacttagacccaacatacaggaggtgttgactttcatacctttagaacctggacatgtttggaatttctaatctaatccctggactttcctgcaggtgtgattgtgtgcattgcaaagcaccttagtgatttgactctcctgccttggccaagcacgcaaatgagattgtgacatatggcttgactctgaacctccaagatgtgactcttttttccagccttggagctgcccacatgttgcattgtgacatattcctaagccctgcactcaggttatgtgactctccttttttgcttaggccctgaatatttttcatgttaagacatattactaggtccaacacctataaaatgggagactaccacctgggctctttctacagagggccttgtgacatacctctgcatcaataacctaggagatgtgatgctccatttttgcctgtacgtgccccacagaaaaaattgtggctggcccaggtaccaggtgatgtgtctctgctgcctgggcctggaccacagagagcattgttactgattgctgggctcagcacccaggtgatgtgactctgctgcctgtgtgctgctttcaggagaaggttgtaacttattcctggctgagtatgcagtcacactcctgactgatctctgccctcagaaaaggttgtgtcaagccgggcccggtggctcatgccagtaatccccagcacttagggagaccgaggtgggtggatcgcctgaggagtttgagaccagatggccaacatggtgaaaccccgtctctactaaaaatacaaaaattaatcgggtgtggtggcgggcacctgtaaactcagctattcgggagcctgaggcaggagaattgcttgaacccgggaggtggaggttgcagtgagccaagatcatgccactgcactccagcctgggcagcagagcaagattccatcttgggaaaaaaattacaaaaattagccaggcgtggtggtatgcacctgtagtcccagctacttgagaggctgaggcacagcagtcacttgaacttaggaggcggaggttgcagtgagccaagactgtgccattgcactccagcctgggcaacaagagcaaaactccatctcaaaaaaaaaaaaaaaaaaaaaaaggttgtgtcatattcctggctaaaaacccagatgatgtgactctcctctctccctattcataggcaggattgtaaaatatatcttttttttttttgagacagtttcattttgtcacccaggctggagtgcagtggcatgatcttggctcactgcaaccttcacttcctgggttcaagcaattctcttgcctcagcctccttagtagctagccaccacacctggctaatttttgtatttctattagagatagggtttcccaatgttggtgaggctgatctcaaactcttgacctcaggtgatgcacctgcctcagcctcccaaagtgctgggattacaggtgtgagtgactgcgcctggcctgtaaaatatatcttgacctagatcacagatgcaatgattactctcatacctcacagtatttaataggagagatgctctctcttgctctcgctctcttttttcttttttttttttttttgagacagtttgttcttgttacccaggctgcagtgcaatggcgtgatctctgcccaccacaacctctgcctcccaggttcaagcgattctcctgcctcagcctcccacgtagctgagattacaggcatgtgccaccacgcccagctaattttgtatttttagtagagatggggtttctctatgttggttaggctggtctcgaactcccaacctcaggtgatctgcccacctcggccttccaaagtgctggggttacaggcatgaaccactgtgcccagcccaagatgctgtctcttaacagctaggcctagagtcatgaatatgattctgggtctccttgtacaaaggtcatgaagaattgccactttcttgcatactgtataaatctcttgtggtacagagagtgtcattacagggttcagcatacagatgagattgtttctcatatacactccccaccaactgttagaattgtcaccctcacacatggacagagcccactggtgaggccctgaatctcacacacacacacagtctacagttaaaattgtgactgtcatatgtgaacatctggctagagttgaaataatgacttatttctaaatccagttcataggtgagaattctacctgtctaagcctaggtaggatagtcaacatgtccctaattggctgggggacatgttgactctcctacctgggcttagggccaaacagttcatggaagggatgaaggctctcagctctcatgcacagatccagttggtgagattgtcactagcatacttagacccaacatactctgatacctagaactgggacatgtgcaggatttttaattactggaccttcctgcaggtgtgattgtgacatatgtctttgttacacacctgagtggtttgatgttcctgccttggttcaacccaaagtgaagattgtgatgtgtcactggacccagcatctcagtgatgtgactcttctttttggacaccacaaattttgggtattgtcaaatattgctggatcctgtacccatgttatgtgactctccaacctatgtcctgcatgttgtgccatattgcagcacaatgtgtcacattagacatcattacatattgctgggctcaacacccaagtgatgtaacattttcctgggccttgactacagggggctttgtgacataactgaatgcccataaccatggtaatgttactcttctcctgcctggtctctgctcacagggaaattgtgacataccattggcctagcatcttggtgatgtgactctcctctttttctcaggccccacatatttgggtattgtgacatacccaaatgtgacactgggctcaacacctaagggacgggagttctctacctggccccttcctgaagggggcattgtgacatacttctgcacaggtatgtcacagttattacctaggagatgtgactctcctcttttgccagcaccctgcttacagggaaaattgtggcacatttctgtggccagcaaccaggtgatgtgtttctcctgcttgggtctttattacagaaaagatggttgacatatcactaggcccagcatctaggcgatgtgactgtcttctgcctggtccctgcttacaggaacgttgtagcatattgctatgcccagcacttttctcttcttttaggttttgcctgcaggagactttgtgacattgctgggccctgcactgacattatctgactcttctgtctctgcctacttgggccattgtgacatattgctgggtccaacatccaggtgatgtaacttttatgcctgggtcctggcaccagaggacattgtctttgcaccactcacacaggtgatgtgattttcttctgttacctggtctctgctcacaggaagaattgtgaccttggccaggctcggtggctcacacctgtaatcatagcactttgggaggccgaggcgagtggatacctgaggtcaggagttcgagaccagcctggccaacatggtgaaacccccatcttacttaaaacacaaaaattagctgggcgtggtggcaggcgcctgtagttccagccacccacgaggctgaggcaggagaatcgcttgaaccaggtaggcggagattgcagtgagccgagattgcgccactgcactccagcctgggtgacagggagactccatctcaaagaaaaaaaaagtgaccttttgcagcacatagctgatttgactgctttgtggagtacaccaagcaggttgtcaaactggtggtccctttactgaaattttatttccacaatggtgttggaggggcagcagcagaatccgtgccttttcttctggagtgtgtgagagtccgtggtcctgagtatctcacacagatgtggcaatttatgtgatgttctgattaagaccattggtacagaaacagtttcagatgtcctcagaaataatgcattgtttagcaaagtgcattgaagttatgggagatggatgccttaataatgaacactttgaagaacacctttgccacatgtcctcaggaccttctgagggctgtgtcatggggcatggtcactcatatttgactcaataaatttcttcaaatattttaaa

SEQ ID NO: 1921 - DNA, 399 bp, Homo sapiens
caacccacagaggtcattgcaacatatctctgagcccctaatttacgtagtttgactcctgcctgggccctcccttcagtgatttttgtgacatattttttgactcagcacctaggtaatgtgactcttctccactgcttggactctgtcacagaaggtattgtgatgtatcactgggcctgacacctaggtgaaggtactgtcttctcctgcctgggccctgcataaattgtatattttgacatgtcactgggttcaacacatgggtgattcaactctctcacatggaccttgagcatggggttattaggacatttatttttgttcatctcagtgatatgactcctttcctccctgaaccctgtcaaaaagaaagattgtgacatatcacttaaacca

SEQ ID NO: 1922 - DNA, 89 bp, Homo sapiens
cttgaacttaggaggcggaggttgcagtgagccaagactgtgccattgcactccagcctgggcaacaagagcaaaactccatctcaaaa

SEQ ID NO: 1923 - DNA, 399 bp, Homo sapiens
caacccacagaggtcattgcaacatatctctgagcccctaatttacgtagtttgactcctgcctgggccctcccttcagtgatttttgtgacatattttttgactcagcacctaggtaatgtgactcttctccactgcttggactctgtcacagaaggtattgtgatgtatcactgggcctgacacctaggtgaaggtactgtcttctcctgcctgggccctgcataaattgtgtattttgacatgtcactgggttcaacacatgggtgattcaactctctcacatggaccttgagcatggggttattaggacatttatttttgttcatctcagtgatatgactcctttcctccctgaaccctgtcaaaaagaaagattgtgacatatcacttaaacca

SEQ ID NO: 1924 - DNA, 89 bp, Homo sapiens; identical to SEQ ID NO: 1922

SEQ ID NO: 1925 - DNA, 434 bp, Homo sapiens
gtgagaaacaaacatttatttttgttacgctacggaatgtttggaagttgtttgtttcactggctagcctatcctgcctgaaacaccccgaaaatccctggaagccctgatgcaggacaggttttcctgtggcaggaagtgaactgctcaggtgatccagagatgcagaagaaacttctgaccctatggacagctccccccatgaaaaagagagtaaggctgagctaagcatgctcagtagaatctttccacattcaatccaagcagcttaagcccctctttcttccctggtaggagtgagggagcttctttccagaggctaaaataatcacaccgccacatggaaggaaacagctccccatcgaaatgtgttttctttttgtgcagctctttcttgatgtctagaaatctttccctttgttccccatccagat

SEQ ID NO: 1926 - DNA, 753 bp, Homo sapiens
aaaccataaaaaccctagaagaaaacctaggcaataccattaggacataggcatgggcaaagacttcatgactaaaataccaaaagcaattgcaacagaagcaaaaattgacaaatgggatctaattaaactaaagagcttctgcacagcaaaagaaactaacatcagagtgagcaggcaacctacagaatgggagaaaatttttgcaatctatccatctgacaaagggctaatatcaagaatctacaaacaaatttacaagaataaaacaaacaaacccatcaaaaagtgggtgaaggatatgaacagacacttctcaaaagaagacatttatgcagacaacaaacgtatgaaaaaaggtcatcatcaatggtcgttagagaaaggcaaatcaaaaccacaatgaggtaccatctcatgccagttagaatggcaatcattaaaaagccaggaaacaacagatgctggagaggatgcagagaaatcagaacgcttttacactttggtgggagtgtaaattagttcaaccattgtggaaggcagtgtggcaatttctcaaggatctagaaccagtaataccatttgacccagcaatcccattactgggtatatacccaaaggattataaatcattctactataaagtcacatgcacacatttgtttattgcagcactgttcacagtagcaaagacttggaaccaacccaaatgcccatcaatgatagactggataaagaaaatgtggcacatat

SEQ ID NO: 1927 - DNA, 3932 bp, Homo sapiens
tagtgcaaagcattctttctcagagcatttagaggcatgcgtggcattttttcagtgggtgtgagattgcacaatacccaggctcccttctactgtggggaagggcctgcatgttggctgttttttaaacttctagttcaatttccttccataatgctactgattttctggcatacagccgaattccatcttttaagcatgctttctacggtgggcttttcaaaacaggtttgagttttgtatgcacacgtttactacctctaactcctacatcagctagtgtggaagagggtgcacctcaaagcttttacacgtaaggacagcggcttggaatgtgagagccttttctccaagcagacccacactctgcatctcagtggcagctcccacaacgtgactgcaatgtctcttatacagtattcctggtgttttcttagtgtctggatgttcttacgtgaaatctgctccccagccctggtccttggcattttctgcttgaagctgggctgattttcttgtaatttacagcaggacgctttcagcagcagtctcttgggattttatctaagatgtttgaggatgagagggcaagaactataaacactcattaattctagtagtctccccatggccagacaatggcgattgttatttaatgagcttttcctttcaatggaattcagctctcacattagtatgatttcatttgatgtttcaaatagcaaagatgctaggtgcggtggctcccgcctgtaatctcagcactttgaggagggccaaggtgggaggattgcttgagctcaggacttcaagaccagcctgggtaaacatggcgagaccctgtctctaccaaaacaacaaaaaaaagacagactgctttgatcaaccctaaatgcaaaagcagcctatttttctttgtttaaaagtcaaaacataaaaaagcagagtataacatacaaaccattcttaactattcattaaaatgggtccttcaacaccttagtggggtttgttgttgttgcttatgcagagagattattttctttttattattttataatttttgaaatagagatggggtctcactgtgttgcccaggctggtctcgaactcctggacttaagtgagcctcccgcctcagtctcccaaagcgctgggattacaggcaggagccactgagcccagccaagacttcagtgttgactgctttggaggcacaaacccatgcaagcgttagttccaaagttcagtgtgtacccttaaatgaacaatgaagcaggtaaaattacccttgaaaaaaatcccttggaccacccataaatgacagtgactttttcaatatggactcatcatagccagttttccttttgaagttggaactgatcacccttttgtcatctgtaccagatcagtagttggcttgtgttacattttgtgtgtgtgtgtgcgtgttttaaaccagtgcatataaattgtatgttaaatgtaagtaactttaagttgacttatctcttcacagtaatcaagcctcacgtaattcatgctttttaaattcagccagccccccctctctgaaattttattatgtaaataatttgtgttccctgatcactcgtttaagttcttagttgtatgtcatctcttctctagcaggaattggcaaacttttttgtaaaggggtagaaagtgaagattttaggctttgcaggccatatagcctctgctgcaaatgctcagccctgctgttgtaatgtaaaagctgccacagacactacatgaacacgaatgagtgtggctggtgttccaataaaactttatttacacaaacgggtggcccttttgggctgtagtttgtcaacccttgctctaacccttgactgagagctactttattaagccctgagggcaggagctatcccaattttgtgttccccagggcaccaaaacacagtgctttggcatagagtaggcactcaacaagtgtgtgaacagatggagagccagccctagtcagtgcactcaccctttgaggctctggttcctccaaacaatgattcgttgtctggattggctggaactgtcacccccgcaattctactccccacccacccatgtgaccttaatgtcagttgctggtctgttgctcttcggggagggagagatggcctggatacagagctaagcaaatgcttctttaagggcccttaaaagtgaaaagtaacttgcaagaggttgagatccttctgagctaggagaacttattccaccttcaaaacctagtttgggctgggtgcagtggctcacgccactttgggaggctgaggtgggcggatcacctgaagtcagctactcgggaggctgaggcaggagaatcgcttgaacccaggaggcagaggttgcagtgagccgagattgcgtcactgcactccagcctgggcgacagagtgagactccgtctcgaaaccaaaaacaagaaaaacccctagttttgtgccttctgaagatagttaggacatcttctttttccgcaaatgctggacatgccaaaaacctaacgcaaaacccaggacattccagcccaactgggacgatatcagagaccatcttcaagtgcaagaagcaggtgaaagcccaggaaattggcagagccaggattatcatccagtactttcatttcacaaatggagaaaccgaggttctgccagctagattttttttcacagtgtcactgctagcaagccactaagctggagctgggatttgagagctgctgctatttagaggatcttgggaataaaatttaaactggagtttaatggccctttcagttttgctataggcaagagaataaaatgaatgaatggataggtggctttatgggtgtaagaaagaagcgaaaaaaactcccaaaccccagtgttcctgaatatctgttctccccctgaccactctgggaatttatcaaatgcagctttgacctccaagccaagtaaactgctcttgttgctattttagtggtttttgtttttttaagacacaaggtctcactttgttactcaggctggagtgcagtggcatgatcataactcattgtaggctcaacctcctgggccccagtgatcctcctgcctcagcctctcaagtagctaaaactacagatgtgcaccatcacatctggctaatttttttttttttttttttgaggtggagtctcgctctgttgcccagattcaagtgcaatggcacgttttggctcactgcaacctctgcctcccaggttcaagcgattctccctgtctcggcctcccgagtagctgggactacaggcacctgccaccacgcgcagctaatgtttgtatttttagtagagacgggggtttcaccatgttggccaggctggtttcaaactcctgacattaggtgatccacctgcctcggcctcccaaagtgctgggattacaggcatgagccaccgtgccaagccacgcctggctaattttttaaaattattttttgcagagacagagtttcactatgttgcccaggctggtcttgaactccttggcctcaagtgatcctcccacctcagcctcccaaagcattggggttacaggcgtgagccactgcacctggccctgttttcatggcttttatttcctttcatcccacacatttgtctgcagtactagacatgttttacaaatcaacaagtttacacaagtatatgcagcttgttttggggggaaaggagacaaaatatgcatattttctgtgtggatttgtgcctcttaattgtgtttctagtctctaaggtgaccctttaacctactcaagatggggcccagagaagtggcctgcgttacagatttattttggcatatgtactaagttccattttctctttacaaataaagtgttttctttcttttctg

SEQ ID NO: 1928 - DNA, 251 bp, Homo sapiens
tctgttctttaacatttgtaataaattctaataacttttcaagccttccagatttggctcgtctgctgtcagtttgctttagagaaagtattagaacctctcgtttcttcatttgctcatctataaaacatagagtttttctgtttgtttttcagacagtctcactctgttgcccaggctagagtgcagtggcaagatcttggctcactgcagcctctgcctccgaggttcaagttatcctcccacctcag

SEQ ID NO: 1929 - DNA, 4857 bp, Homo sapiens
attgcaccactgcactccagcctgggcaacagagcaagactctgtctcaaaaatgaatgaatgaatgagtgaatgaatatcacagtatgaaggtgcctcatagatgtattggccttggacaagataggtcgtgaaccataggtggtggccctgctgggatccctgacttgcccctcctgctggaaggccctcctcctgccaccctgttgccatggtaacctccacctttccctctgtatctcctggcaaggtgccaagactggctagaggccctgcactggtacaacactgccctggagatgacggactgtgatgagggcggtgagtacgacggaatgcaggacgagccccggtacatgatgctggccagggaggccgagatgctgttcacaggaggctacgggctggagaaggacccgcagagatcaggtagggcctggcagacctgcccctgggctgcaacagggctgggcagggaggaacctaatttccattccactgggagttatttatgacaagatgacaggctgaatcgttcttccagggaggggaatttatggagctagtatgaagatgaacattgttattttaatggttatatattacggctttgtagggggtttttgcaattttaaaaactgaattgagattttcataacgagagaattcaccatcttaaagtatatagtttagtaggggggttttcctttcctttctttctttttttttttttttttttgagacggagtctcgctctatagcccagactggagtgcaacggcataatcttggctcactgcagcctccacctcccgagttccagcgattctcctgcctcagcctcctgagtagctgggattacaggtgtgccaccatgcacagctgatttttgtatttttagtagagacagggttttgccatgttggccaggctggtctcgaactcctgacctcaagtgatcggcccacctcggcctcccaaagtgctggattacaggcgtgagccaccacacctggcccagagtttcactcttgtagcccaggctggagtgggccatctctgctccctgcaaccttcacctcccaggttcaggtgattcttgtgcctcagcctcctgcatagctgggactacaggcacacacccagctaatttttctgtttttagtagagatggggtttcaccatgttggccagactggtcttgaactcctgacctcaggtgatctgcccgcctcagcctcccaaagtgctgggattatacgtgtgagccaccatgcctggcctcctttccttttctttctttcttttttctttgaaatagaatctcactgtgtcactcaggctggagtgcagtggcacaatcatagctcactccagcctggaactcctatgctcaagcaattctcctgcctcagcctcccaagcagctgggactacaggcacttgcttccacacccagccaatttttaaaagttctttgtagtgacagagtcttgctatgttgcccaggctggtcttgaactcctagcctcaagcaatctgctgccttggcttcccaaagtctttggattacagatgtgagccactgcacctggtcctagtgggttttagtatagtcataatgttgtacaatcatcactgctatgtaattccagaacatttccatcaccccaaaaagaaatcccgtaccagttagcagtcctccccgaacctagcagccactatactttttgtccctatagatttgcctattctggagattttatataactgggagtatacaatttgtggctttttgtatctgcttctttcatttagcataactttttcaagattcatctgtgttgaagtgtgttatcagtacttcattccttcttattactacataatattccattgtgtggatatacagcctttatccattcatcagttgatagacaagttatatatatattttttctgttacataatgtattagtcttcttgggctgccaaaacaaaatactatagagtgggtggtttaaactaaaaaaattgctgggcacagtggctcatgcctgtaatcccagcactttgggaggccaagatgggaggatcacttgagtctaggagttcaagaccagcctgggcaacataggtaaacctcacctctacaaaagaaattgttttaattaactgagtgtggtggcacactcagtgagctatgatcataccaccgcacttcagcctgggcaacagagtgagaccctgtctcaaaaaacaacaaaaaaaattatttctcccagttctggaggctgggaattccaagatcaaggtgctggccagtttggtttctggcttgtagaaaacagctttctcactgtgtcctcacatgacctttctcctggatgcaagtggggagacagcaagagagctctgctgtctcttttgcttcctaaacgggaatgagctctgtgtgattagggccctacccttatgacctcatttaagctttatcacctcctcacaggctgctagaatatgaacgtcccctccaagtctcatgttgaactgtaatcaccactgtgaaggtgtcaagaggtgggactgttaagaggtgattaatgttgttatcatgcagattggtcagtcatcacaaaagtagctttgttataaaagcaaatttggccccctcttgctcgcttgctttctacgtctcttgctctttgccttctggcatgggatgatacagcaccaaggcctgtgccagatgctggtgctatgctcttggacttgccgggctctagaactgtgagccaaataaatttcttttcattataaattatctagtctgtggaattctgtcatagcaacataaaatggactaagacacagactgtgtgtctccaaatacagtgcagttacatcatgaatgaagagttcaacatatgaatttgtggatggggagcccagtggggacacagcattcagtccctaacatataataaacatactaagttcctaatttcacaggtataggatgaggctaagttttaaaagtttttaagttatattttaaaaattaacaaagaataatgcaaatctaggctgggcagtggctcgcgcctgtaatcccagcactttgggaggccaaggcaggcagatcacctgcggtcaggagatcgagaccaggctgggcaacatgatgaaaccccatccctactaaaaatacaaaaattagctgggcgtggtggcaggtgcctgtaatcccagctactcaggaggctgaggcaggagaatcgcttgaaccccagaggcagtggtgacagtgagctaagattccgccactggactccagcctgggtgacagagtgagactccatctcaaaaaaaaaaaaaaaaaaaaaagaagaagaatgatgcaaatctataatcttttatttgaaaattttaaatccaaaaagctccaaaaacctgaagtatatttgtatgttttacacaaattcacttggtaaaacctgacctagctgacatgaagctgtttgtaagtcgttatttcttccacttttgcacatccccacttagttctgcaaaagttctcaccctgattctcattggctcaaattagttctcagcctgattctcattggctcaaactcaatcatctacataccccaaaccaacagtagttgtttagatggcttactctgattggccatgactaaatctggaccaatcgctgtagcttggtgggggataggaggagtgctattattggctagattttatcacaggcccacctttagagccccgcccggaacacctggagggagagggcacacggagtagtttgagttcttaaggaaacgtcagggtgttcttctgggaggggtgatgggggacactgggctggcaaaaacaacaggtggttcacctctttttgcccccctttgctgtctttcaggggacttgtatacccaggcagcagaggcagcgatggaagccatgaagggccgactggccaaccagtactaccaaaaggctgaagaggcctgggcccagatggaggagtaaccaggaaaatcactgccggctagtcccaagcaaacgggctaggaggaaagattaaaaaaacaacaacaacaacttatttagtttggggaggggaagcatttttaagtgtgttgtaaaatcaaattttatatttcattttttgactcttgaaaaatgtctttgctccttggcagctaccagcagagactctatagctgtctcttagggcagtattttggggaagtggggcttgaagaagcagcctaatgaaccaacataccgttttgtgtgtggttttttttgtttgtttgtttgtttgttttgagacagagtcttgctctgtcacccaggctggagtgcagtgacatgatcttagctcactgcaacctccgcctcctgggttcaagtgattctcctgcctcagcctcccaagtagctgggattactggtgcacaccaccacactcagctaatttttgcatttttagtagagatggggtttcaccatgttggccaggctggtctcgaactcctaacctcaggtgatccacctgcctcagcctcccaaagtgctgggattacaggtgtgagccaccatgcctgcccattttgtggttctattttcatttttatttctttttttttttttgtcacgagatataagaaagtgctttttgccttgaatggacaattttagggctgtgctcactagtcttttcaggctggactgaaatgtcgggcccatggagccctgtgttttgtgcatcgggatgagaaatgaagcacttcacgctggctttcctaagtcacggggcgtgtattgccg

SEQ ID NO: 1930 - DNA, 1135 bp, Homo sapiens
tagagatgaagtctcactatgttgtccaggctggtgtcaaactgctggtctcaagtgatcctcctgccttggcctcccaaagtgctgagattacaggcgtgagccaccgcacccagcccagccccgcactttgagtaggcagaggtttgcctattgtgcctggtggccaggcaagctgaagacttaaaagaggaagttgggagaagattggttttcaaccaatatcttattaaggaagttgagtcattctacttctgctatttatccctctgggcattcagagaaggacaagtttttacttccagatgaaatagtcatgagagggatttgccttggccccttgtagacattttcaagctggccctgtaagacagagttttatttccctttcgtgtatggagaatcaaggctccaagcattgcatgaactaggtaaggctcaagataccttggctatatggtgctgaaacagagaagtcccatcttctcagtgatggcttttagtagcctggtgacagacaagggaatgaacattcatttagcctcttctgttggccaggcaacctgattggcatttcatgtactcgtcttcattcggtcttcaaaacagctctgaaggagctaagagaagaaactcagagaagttaaaagaagtggctagctcaaggtttagatgtcggcttaggaggcagcagtctaggttcaaccccacctctgcaacctgcaactgcgtaacttttggtgtgctactacacttccctaagccatatcttcatgtctgaaaatgagatgacagtaggtactttgtaagtatcgacagttagtattctgagttggagttgtccagccctcaaagaatcctgacagatgggctacattctcagaactagaaggaacctcaaaagatttcctaggccgctggtttccaaactcttttcttggagaactagggattttgtagaggtcctcggtggatgaagggacactgagcatgtggagctccttcagccagggcagcgggttcaaatgtgagttacatgccagttgcatgcatctggttcttttagttattgggagatgaggtatgatttcatttgacaaaaatggtcccactgctcttcttaaaaaaaaaaaaa

SEQ ID NO: 1931 - DNA, 1137 bp, Homo sapiens
tagagatgaagtctcactatgttgtccaggctggtgtcaaactgctggtctcaagtgatcctcctgccttggcctcccaaagtgctgagattacaggcgtgagccaccgcacccagcccagccccgcactttgagtaggcagaggtttgcctattgtggcctggtggccaggcaagctgaagacttaaaagaggaagttgggagaagattggttttcaaccaatatcttattaaggaagttgagtcattctacttctgctatttatcccctctgggcattcagagaaggacaagtttttacttccagatgaaatagtcatgagagggatttgccttggccccttgtagacattttcaagctggccctgtaagacagagttttatttccctttcgtgtatggagaatcaaggctccaagcattgcatgaactaggtaaggctcaagataccttggctatatggtgctgaaacagagaagtcccatcttctcagtgatggcttttagtagcctggtgacagacaagggaatgaacattcatttagcctcttctgttggccaggcaacctgattggcatttcatgtactcgtcttcattcggtcttcaaaacagctctgaaggagctaagagaagaaactcagagaagttaaaagaagtggctagctcaaggtttagatgtcggcttaggaggcagcagtctaggttcaaccccacctctgcaacctgcaactgcgtaacttttggtgtgctactacacttccctaagccatatcttcatgtctgaaaatgagatgacagtaggtactttgtaagtatcgacagttagtattctgagttggagttgtccagccctcaaagaatcctgacagatgggctacattctcagaactagaaggaacctcaaaagatttcctaggccgctggtttccaaactcttttcttggagaactagggattttgtagaggtcctcggtggatgaagggacactgagcatgtggagctccttcagccagggcagcgggttcaaatgtgagttacatgccagttgcatgcatctggttcttttagttattgggagatgaggtatgatttcatttgacaaaaatggtcccactgctcttcttaaaaaaaaaaaaa

SEQ ID NO: 1932 - DNA, 511 bp, Homo sapiens
  SITE (249): n equals a,t,g, or c
tggcacagtgccccatacacagaagacatttatggacggtagtggctattacattccctggcacttgggagacactcattgaatgtttatagggtggatgcagaagcctaccataaaaggcttcattgagtagataggccttaaaggataggtgagatctgggcagacattgataagggaggaaggcaagcagccactccctatgggaggaacagggtgggcagaagaagagaatcagaggcttgccangtgctgccctgctcgggcaagtgaaggaatcagtctggaacaaactgggggaagggctgtaggaagggcagaaagggtagaaaggggagtcaggatgagcatgtatggggacttctgagtctgcctcgccagatggctgttttgccaggccagcttgctctgcctgatacttgcccttggttccctctttttttttgccctccttttctttctttctttatttttccttttgagatggggtcttgctctgttgcccagactg

SEQ ID NO: 1933 - DNA, 968 bp, Homo sapiens
gatttagtggcgtaactgaactaaaagtctgacaaattgatggctgattcagccctgacttgacaagacccctcatcagtaagggatcttcgtctgcttcctgtctacctgggctaaggaattattaccaacagtagatgggcagatgctaggggtagtaatatccacatgggtagtaatactgctcagttcctggatgttctagatgcctctgccaaccagattttattctaggaaggaactagagatccttgggtcctaagagaatgggccaagagtgtcctggcttgagccctaactccatgttggatgctctaactgtataaattgagcctcatttattcctgtaggtaatgtacctctctaagccttaatttcttcatctgtaaaattggagataatattgccaaccttgcagggttggtgtggaatgcattaacaaggcagatagagttcctggcacagtgccccatacacagaagacatttatggacggtagtggctattacattccctggcacttgggagacactcattgaatgtttatagggtggatgcagaagcctaccataaaaggcttcattgagtagataggccttaaaggataggtgagatctgggcagacattgataagggaggaaggcaagcagccactccctatgggaggaacagggtgggcagaagaagagaatcagaggcttgcccagtgctgccctgctcgggcaagtgaaggaatcagtctggaacaaactgggggaagggctgtaggaagggcagaaagggtagaaaggggagtcaggatgagcatgtatggggacttctgagtctgcctcgccagatggctgttttgccaggccagcttgctctgcctgatacttgcccttggttccctctttttttttcccctccttttctttctttctttatttttccttttgagatggggtcttgctctgttgcccagactg

SEQ ID NO: 1934 - DNA, 1617 bp, Homo sapiens
cccaggaagtgtaggaatcatccaaagtggtaaaagagcagcgcttctaaactctgacttcacatggaaaataacgcgactactaaaactgataacaatagcagtccatgccatttgacaggggtgtgtaggagaggtggtgagcaagctgaaatcccttcaggtatttgcagaacttctgagcaaaagctaaagctaaaattaacattaaatatgcaaagtatttttaacccaacataaattaacaatgttcctatttcaattctattgctcttgggatgactatgtcctttggaaaatgtttaaataacttaagatttccgtcatgagtttactatttcaaaacttatttttttaactgcaagatacctttttatgttaccaggagtgttaccagctagctgccaaaacctggttgaagttctcccactttatattgtaaatgattacatagtttattagtaattgtgtcccctgtccacccactggtccatttggatgggaaaattttcaaaataacttcataagaaaatgataagaaaaatgtggtcaccggtatcatgaggaacttccagacagctcagcacagaaaagttggttttaaagtcctcgaaaacgttactggtaatgagcttccactcctttagtcgttgtgcatagatacaccacagagtaaggttataaaaataaaagttgtttcaggaaatttcccattgctttattacatgatcaatgagagtaaagagaaatggaagttgacgggataggaatgagggacctgctggaagagtgatcacaatatccaaaggaaatttaaaatgcctgttgaaagtgacacactgactcagcattgtcactaacacagaatcaccacaataaaactgccctgccctgtggctcctggcacctcatgtctctttaggttaagcagagagaggtctgtgttgctttggaacaaggtgcagcctccccctaagctacagagaggctctgagcaaggaccagcccccagggtgcagccttgcccaccctccacaggctccagagcagatggggtggctctagagagcaaatggtcaaaacttctagcgctaaatagagctttaacatgtctcagatactagcaaaatagagaagcctcagatggctttaggtctggaagtgtgttgctaaaaatgctaaaaatttaacaaacttttataaatccttaagagatctttttcagttttctgaagtaccgttaattgcccatgtgtttcaacttgcagacaggcaagaatttggctttgtatgtttaaaaatatgtacatcttggttcataatgatgatttatttccaaaatggtgactcatactaggattacatataaaacatcatatgtgggccttatatgtaataatgtgtaagtatagtatattaattactctgacataacatgggcagagatttgtattaatttatttctatttcatctaatcaatattttacttaagtctaaaaccttatatatatattgacatgtatcatcgtatatataaacattgtatctattgaactgagcaatctgtagtttattttaaattctgatacattaaagatgtggagaactacataaaa

SEQ ID NO: 1935 - DNA, 147 bp, Homo sapiens
tggatcacctgaggtcaggagtttgagaccagcctggccaatatggtgaaactctgtctctactaaaaatacaaaaattagctgggcgtggtggtgtgcgcctgtaatcccagctactcaggaggctgagacaggagaatcgcttga

SEQ ID NO: 1936 - DNA, 611 bp, Homo sapiens
ctgcaggtggagcccagttgacaggaaatgtttctccagaagctgaaaagctgcctggtaaaggcctttcataaaatggtctgcgtttgggaccaggaagacagaagactcctcaagaagagaactggaaccttaacccacttcagacttcttcatgtctgaagcttatttccaccatcccattgagaaccaaagaagcgagctccttggagaatcggctcccacctggaccttctgtttatccttccaatagctgctgcattcatccttcccagctaatgacacttccagcctttcgtgtttcaaagtatcacggactttgcaaaagattccaggtttctatggagcagatagtacttttaacaatcaacatgtgcattattatttcctcctaaggcatacttagacatcaatgcatgctacagcaaggcaacttatctcaccctcaccaaggtatgaacttcagaatttgaacttgttcctttggggtaagttgtatcaccagcactcactaacagactgtattttccagtgaggtttcattctgtttcagatattctgcactttcagtggcaaaattttaaagaaaaggagacaaaatggaacacaaa

SEQ ID NO: 1937 - DNA, 612 bp, Homo sapiens
gaacatttttaaagtggtctttgcctatcctttaagtgggataactaaaatcatgagatttggtaacaacaatatgtaggtatcaaatgagagtatagccctgacatttgaaaccaccatagcacagcttactatttgatggtcatttgtactttgttcagtgaagctagatattagtagagcaaggccaagtcattaataatctagtgtggcaaatggaagatgtactggactctggtgttctgaggtagttggagatttatactttgtacacaaatatattgtggtcaaaatctttctgtaacattatttctctgtcttagcacaggctttacttaacatctctccttgattgtcatttcattcttttgcatgttatttactataggtatcgaggtagattttgagaccaaccaataaatcttcttgaaacttagcttcttagaaaggaaaatctaaataccagccttttaaaaaaagtagctgaattaaaggatgagtgaaccaaaggcaaaggtagcctttcctcagcctgtgttttagctttctaaatgttaacaatagcttcattcttgacttattggtaacattcaaaatactacttattatttc

SEQ ID NO: 1938 - DNA, 10378 bp, Homo sapiens
aaaaatacacagcagttcagagaaattccagtgaacgtgaggggcacagcataaacactaggtatttaaaggaaatcatgatgcagtattttggatacacaactcaaggtctgtgtgagacggtgtattgttattatatttcctcttcctttaatatagcttaggtagagaatgcaagtagaattggtttaagatctgttagagaaaaggttatggtgatcttggaaaatatgcttttgagagtaagctctgtggagccaagtgttggtatatcacggtgagcaatccaagatcttgaagagcttgttaaaatagttatctggtgggggacacgtgtaacaatcacagcagtacaatatgatttgcttggttaaaggcatgttcaaagtactaggaacatacagaatgaggaggagctagcataacctgtagagtcagagaaaacctcattgaggaggtgacattttgtgataagataatagggtctttgacacttagagaagagttgggagaagagtttatcacctgatgaaaagccatgtacaagcatggctatgagaaaatttggccagctcaggagagggctggttgttgcatgtgtctggaacacaggatctgtgtcaggtgcagcagtggcagttgatagtaggaactgaggtcattaaaggacttggcatgtcatgctaaagagcaccctgttggaaggagatggggtgaataaaccctggggcattgaggactggctgagacacagagaacagttagtgcactgaaatagttcaactgtgagaatttggtaaccacctagttaagggatgagcctgaggtttatttgataactaagtgacttaatggatgtactggtaagagagagaggaaacatggagcaagtttgaggggaaaaacagtgactccgtttgtgcagctaattgcatatgtgggcttgtgggtctttcatttattcataaacgtgttgagaaatacctgctacctatctagtaaagtaagagatgcatcctctcttaaaggcagtcagcttagagtctggtgatttgaattgacatgtccactgatagatgttgacactgtgagactggcggttcagtttgaggtttcatcagcattgccgatattggagccatgaaaaaccaaagaacagccagtgagagaagagatctcagagaaaataaaattgagaaagtgaaggacaaaaaatgttgtgaagatagaccaagattgatggaatcagccatagagaggtcaagtgggatgagaatgagcacgcatctgttaaactttgtgcttaggagcagaatctaagggaagggacagtccagaggttagaactcagggtaagatggaagaacaggggcatctgggagtgaggcagtttggtttagtgtagaacctttttgtaacaagcattcccttctgtctagatgacttttagatatgtttcattggcttggtaccttttagaataaaatgatttagaggatctctcattttcagggaaaataaatatattcctcctggacaaagaaatagagaagtcatatcctggggaagtgggagacagaattcaccgcgtatgggccagcctggatcgggctccatgccatcaagatccacttctcacacttcagatttcaacccgaattctggttcagaccaaagagtagttaatggaggcaagtattttgaccagacttgtcaatatcattgataaaatagttttctaaatacttaaaatacttaaaatagtttacataactgatatgaatgtgcactttaatgatttggtgagtagctttcacttcagcattacttaaaattggcttttgtggatattaaattagtaaaacattgtatatgtcattgacatatatattatttagcatgatgaaatattcatgatgtactaagataaagtgctacatttaacccaagacaatcacttggccaaaaacacttcacatataaagaaattggaaactttgggtaggttctcaattttaaaaacactggataataaaattttttagacataatttatatggaaaattctaacctatgtgcaacactgtggttaatatagatcaattttcattatttgtttctatattatgcttacttcaagaaaggatctgaggtaacttataatacaagacatgatcaagagtcatgtgaagaaagtgactagagaaatttgcttaaaaaacaacaaaaacaacccttagtctaagggtggatgttacagtttagcaacttaagtaaaagaaacctgaatctttagtaggaagacattttttactctacctctaaatctaggttgaatatatcttgtaggttgtggatcttttccataaatcagggatactgaacaacagttctatggatggtatggaaatagtaatagcaatagtatgttactaactttgtgggaaaagagtggacattcaattttagctatttaaatttggaaagttagatgaaaatagagaacactaagtttccaatttcatttgttttcattgagtcttttctccagaattcctctccaaatggacactcttgagtattttcagtacttaatattgggggtgaaatttctttgctcactgaggaaagattttagttgtttataaacagaattttaaagttaaaaaacctgaagggggctgagaaatatatgatacttaagtgtgtggaaccctatggagaggagacctggactgtttgataagattaaggtaagtgatatgtaatgttaaatactagctgtatctttacctaggcatatccatcagtataaatttatttggtgatgactgctttgtagttgcagtatttattaagcagtcgcttagataagtgtttaactgtataaattatttagaaggtctccctttttctagtttaatgaggtcaagactttttttttgaaatagcaatgaatattatcatttgatactcacaggagtcacaaactctagaagagtaatgttttatttctacttaaatgggacttgcttaataagattccaaactgagttctgggttcaagtgtaaacctgatgaaaatcatagataattgtaaggaaccagcatttctaattggatataatagctactgcttattttcgttatgcctcagagttaaaactaatacagtaaataatcttactcctgagtaggaattattgtgatttattatgtgaaattatctagtgtatgttatattcctttaaacaaccagttactgagaaacagttatagaagcaggattaataggcaaagtcttaactgtcttcttcaatagtgtgtatagatcctaattaaccctttgggaacgtgtattcatttaaacagacttaatcttaaggaggttaaagtaaaatgtgaatttatgtcagttaagttatgctaaaacttatcacaaatcaaatgactgtcctcaaagggttaaaatgtacaagaaatcatttttgtcattttactttttttctgtttacttttttccctcatttttttctttagtttttatactttccttcatatcatttgttctgtcaggtgttccctggccatcgccttgcccatctccttcctctcgcccaccttctcgctaccagtcaggtcccaactctcttccacctcgggcagccacccctacacggccgccctccaggcccccctcgcggccatccagacccccgtctcacccctctgctcatggttctccagctcctgtctctactatgcctaaacgcatgtcttcagaaggtacaataccacaatttgttcatgtttttgtttgtctttgtttaactcctatgtgagtttataattacaaaatagtttcctcttcattatttaataacctataatttctgtgttttaactttagtttattaaaactatttctattaaccttttgttcattagagagaaatttgataaatgtgtgaagctataaactctcttgaattgttgttaaaaagggggtttatctctgcctgataattatgcttctttacagccccagaagggtctgccccacagccttccccctccttatttgcactgtatacagtagttaaacaaatgaactttcttcagccagtcttgaacttaggttcattttacagctctttggccaaggtcctagtgaaccttcctattggccataagcagggatggtgttttctgggtcttttttgagagcgacagcccatgtagctgactttgcgtgtctgcccttagattaaagtagttgatttttagaatgccagaagaattctaaatttaactgagtaatttttttaaagttagctttgcaatcttacatagtgaaaggctgctttaatctggaagaagtccttgatctgagataaaattgataaaaacgacatatgaatttgaatatttagctatttctttcctcgtcaaaaataagaataaaatcttgtaattcttattcagtatttggcgctaaatccatcattgccacatatcaaatacagggatatgttgtagaaaggtaacattctaatttaaatgccacccatatattaaaaacctgttttctgaatcataatgtccttttgatactagttctgaatatttgtgttaaaattttaatctgatttgttcattaaaattagttaatattgcttatgttgggactaataaagttttccgcacaaaatgtgtttctcctgcttccctggagaaaactgtattggctacttttaaataaattgttaccatctaagcaggcaggtcatatgactttgactgaagcatctaaccttgaagagcaagttccactgattttcaaggtgacttctttgctcaaaagggccttaatagtggtcactaaatgcaaaattctgttgatatttttcttgtagtccatcatttgagtaagcgatgtttatttaatgagaatatattaaataaaacatgatcattaatgactgtgaacatctttattacattaagatttaaggactgctcatgtattaacttcacacagaaatatactttctgtgtcattcagagatgttgaatatttccatttgaaaattatagtgtataacattagcattcttctaaagatcatgttcgtgtttaaattcctgttggaagccaggcatggtggctaacgcctgtaatctcagcactttgggaggctgaggcaggtggatcacttgaggtcaggagtttgagaccagcctggccaacatggtgaaacctcgtctctactaaaaatacccagctacttgggaggctgaggcaggagaatcacttgaacctgggaggcagaggttgcagtgagttgagatcgtaccactgcactccagcctgggcgacagagacagactctgtcttataaaaataaaaataaaataataattctattggcaacatatattaatttgaagttctaaagagtttggcagccgggtgagagagtgaggagatttggctttgacattagggaagttttcgcttggtgttaacaccagtaggcttctctgatgagggccattctgtccactcttttacctgatagattggtctaatgcacagtagactgatttagaaagagtagtcactagtggcatggcagaatcaataatgtagaattttgacaattcatatagtgctgatttctcccccaaatgtcagttattttggtcatctattaatagactaatacaagtcatccctttaatagaattttcagctcacagcctgctaagcctaagaaactgcttacaggttactgcttactgttttaagccgagttttaaaattgatgatcatgatagaagagataaataaactaaaattttagagaaatttaagaagggtatgtacatatgttttagtggtatcggggtgtatagggattaatagtcttctgtttaaattttttttttctaattttagaagtaatgtagaaaattcgggtcagggaaaggtaaaatatatggaaagttaaaaatattttatcatgtagtcataatttctagtaacatatttctttacaaataagacatagttgaaacagattgctacagttcttttaagagttgacatcttattgttgatttcttaccaccaacttcatccctccctttctttaaaaataaagggaaataataaaatttatttataaaactttgtggcattccacaaaataattctgaaagaattagtatggccaaaaaaatatgtatggtgttttttttttttctatttttaaccaaggaaaaactgtagagtgagtgagtgtgtgtgcatgtgtgtgtgaatgggtgtatttagcagaaaagtagtactgatgaatatcatggaatttatgtgatgttcactgtttcttccttagggcctccaaggatgtccccaaaggcccagcgacatcctcgaaatcacagagtttctgctgggaggggttccatatccagtggcctagaatttgtatcccacaacccacccagtgaagcagctactcctccagtagcaaggaccagtccctcggggggaacgtggtcatcagtggtcagtgggggtaggtaacacttgggcataatgatggtactcattttgtcattacactagatataaagagggctgagctacaactctgtttgaggaagtgtaagtatgtatatgttaaaaatagtagaatcaccaggaattgggaaacccatatttttattctgggctctaccacttattcatcatatattaaagcaagtcagacactcattctgaagttgagatttcgcagtgagtaaagtgttaataattcttgcctagtctacattatgggattgtgatgagattcctataaggttcataaatacagatatattgtaaaactataaagttttgtaaagtacctctctaatatgaggcaaacacagtatgtaacactatttggagggaccgtatttccttatctttttagcagctttgtttatcagtacattctataaacatttatttttggcttacattgtagtgtgtttctatagcatctgtatatggcactaattcccaactatatttccataataaggaatatcaaatacaaataaagggtccaagttttatttgtgattagcataaggaatatgctgacagcagctataaaagtataaaaattaggctgggtgtggtggctcacgcctgtaatcccagcactttgggaggctgaggtgggcggatcacaaggtcaggagatcgagaccatcctggctaacacggtgaaaccccgtccctactaaaagtacaaaaaaaattagccgggcatggtggcgggtgcctgtagtcccagctacttgggaggctgaggcaggagaatggcatgaactcgggaagcggagcttgcagttagctgagatcacgccattgcactccagcatgggcaacagagcaagactctgtctcaaaaaaaaaaaaaaaaaaaaagtttaaaaactagacgttgacatgattttacaataaggctgactgcttttgctactttgccaatcagtccttagtgctttgttcccataactgtggtaagcaagagcttacaaagaatacttaaaacaaacaaacaaacaaacaaaaaaaacactttttctcttttaatcagtccagagaacctttaaaagaaacaagatcggccagttgctgtggctcatgcctgtaatcccagcactttgggaggctgaggtgggtggatcacttgaggtcaggagttcaagactggcctgaccaacatgatgaaaccccatctctactaaaaatacaaaattagctgagtgtggtggctatttgagaggctgaggcaggagaatcatttgaacccaggaggtgaaggttgcagtgagccaagatcacaccattgcactccagtctgggtgacaagagcgaaactctatctcaaaaaaaagaaaaaagaaacaagatcttcaagcttaaggaaacaaaaacaaaactcagctgtgttaaatctgtttttagttgctatacatttctgctcagcttcatgtgatgcacattcatgtaattgtatcctaaattcctttgtactttttattttcttccttggtcttcaattatcttaagactaccaagaaaacaaaaattttaaaaatcttcttcagccggtcaggcgcagtggctcacggctgtaatcccagcacttggggaggctgaggcgggtggatcacgaggtcaggagttcaacaccagcctggccaacatggtgaaacgtcgtctctactaaaaatacaaaaattagctgggcattgtggcgcgttcttgtaatcccagctgctcaggaggctgaggcaggagaattgcttgaaccaggacccgggaggtgtaggttgcggtgagcggagatcgcgccactgcactccagcctgggctatagagtgagactccatttcaaaaaaaaaaaaaaaaatctgcttcagctattctgttaatcttttgacattacttagatggtctggaaataaattttgagaataacatgattagaagtgagagagtataagcatagttttggagatacactcagaatagcattatagattttctctttttactaattggaaaaatggcagttgttgaataatagttttcttccgtgacccttgtgacttaaaaaaaaaaaaacactgaaatgaaataatcgaaccattttctctaaacctttgaatctgagctctgcagttaggtttataatggtatatgaaacctattagatatatacttggaagtcatatgggatacaaaccctgcttttattatcttccccttttgactaacttgggtctcaagtttccttaattactgcacagtggaccttgatgttgctataaagaatgtgtagggctgggcatggtggctcatgcctgtaatcccagcactttgggaggccaaggtaggcagatcacctgaggtcaggagtttgagaccagcctggccagcatggtgaaaccccgtctctactaaaaatacaaaaaaattagctggttgtggtggcgagtgcctttaatcccagctactccagaggctgaggcaggagaatcacttgatacatttagttaggagagaaaatcatacttatgttagtaattgctgctgttcttcatatacttgtggttttgattgccagcaaattcctaacattttggaaaagaaaacagtaatgggataaagggtaagggctagagaggacagttttatttacctagatcttcagagaagcctgaagcctcttttaggaagtaacatttgaactgagaatgtaataaatacattttccctttcttctagttccaagattatcccctaaaactcatagacccaggtctcccagacagaacagtattggaaatacccccagtgggccagttcttgcttctccccaagctggtattattccaactgaagctgttgccatgcctattccagctgcatctcctacgcctgctagtcctgcatcgaacagagctgttaccccttctagtgagggtatgtaacaaagggcttctggatccataatctcagctgtgaaattgaatgttagagggtgatattatatgaaaaaattctaggttatttttattcatagacaagtatttttagtgcacatttaaaagtttatgtaaattttgatgttgtttaatactactaatttaatatagtgtctgtgttacaaaggttaacattcctgggtgtcaaatacctacataaataaaattattggtgtttcatatgacatctgcaaaggaaaaaaagcctctgtttaaatgaaagcattattttccaaaaacataggaaatcaaaattattgttcagtgttttcttgttttgcttttctaacttatctgaattttttttaaaaaattgttttctagctaaagattccaggcttcaagatcagaggcagaactctcctgcagggaataaagaaaatattaaacccaatgaaacatcacctagcttctcaaaagctgaaaacaaaggttagagtttaaagagtcattaagcttaactgtaggaataggaagaagtatgtctaatttcatgcccatacagaatatttttgttcaacatttcttcttactattgtgatagataaatgtattgcttgacaaattccaaaatccaaatttaatatttgaaattattttctgatcttatatcttattctaatttctatcatctcatactaaaaagaatgtgatgttaaagtttaaaaataaacctgtgtcttaacagttcttaattttacaggtatatcaccagttgtttctgaacatagaaaacagattgatgatttaaagaaatttaa

SEQ ID NO: 1939 - DNA, 258 bp, Homo sapiens
ctgtaatcctagcactttgggaggccgaggtgggcagatcacctaaggtcaggagttcgagaccagcctggtcaacatggtgaaaccctgtcttgaccaaaaatagaaaaattagctaggcatggtggcgcacacttgtaatcccagctacttggcaggctgaggcaggataatcgcttgaacccaggagacagaggttgcagtgagccgagatcacaccactccactccatcctgggcgacagagcaagactgcatc

SEQ ID NO: 1940 - DNA, 542 bp, Homo sapiens
tgaaagtaaataaattgtacctgcttttagtatgttagccataagtccttgctgtttcctttattctgtagaagtgagcttacctttggtgataaatatttgaaattgtatgcatttataacatagaccagagagtaatttttttttactgtaactctcataaagaattccagaaacaaggcttctgacccattgggttattgagttcagttcataattattgggtcactgttgttaccctggacatctgaatgggtggaaatggtaatttagattaaataactacaggtaaggatcatcagttacatgtcacgatcacctgtaaaattctgtgatgaccaaagaggtgatgatagggttgggttaatggtaaagaagaaactgtcagtgggatttgaaagtgggacagcatgtcagtaagttaagtgctttcaagattgagatggtttctgtctgagtggatatatgttaatgtgttggagaacagctctgagccttttgaagatatcttagccataacagcaaattatggattcattagg

SEQ ID NO: 1941 - DNA, 272 bp, Homo sapiens
cccatgtgcatggtggatcataatggaaagtaaatggaaaatgtcatttatctacttactcaaccggcagagctctggtaagtgtttttaatggttagtatttgaagaataataagacctgtaatggaaacggaagaggatgtcttcaattaatttttgttctgtgactgtgccttctgaatggtaggacagatggacaaaatcaaggcataggggaaaaatagctgaaaggtatttagagggcttttcaaagagatttcatgaagaaaaca

SEQ ID NO: 1942 - DNA, 817 bp, Homo sapiens
gctggaagaataaaaatggttcttttaataaacaagatgttaatttgaaattcaacatgtttggaattctagatgtttcaaattgaaatgtaaaattctaagtatctaggattaaaagtccaaaaataatcattcaatttttaaaaagtaattttatgaccttcataagggagagacctctaacctcccgcagttgagcaaatacactctgagagacattagggactgtggcaaaaagcaggcaatccatgtgtgtcacttaagccttgagcacagttcagtaggcaacaaaccaggaactgtcctggcagataagacagactgtgcaaggtcatcgtcatcggcatgggaagggcattaattaccaaagtggagacacagtcactgtctccaagagcatttggaatcacttcacagagttctcaaggaggggaaggctatctgtcagctcctggcgggactgctgccccatatactgtgatgaattgcttcacatatctgagttctgatgggaaggagtccaagtgcggtagctgtagagaacgctggggaagcccagttctgtgtagctcacgtatgaaaggaatattcatgaagagcaaaacagaggcattatttgagattaactgcctgagaaacctagtctaatcccaagtgtctagaaaatgttgactacttgccatgtgcccagtaaggtgcttggagctttatatgcatcctctcatttaaccctgtgacatagttatgctggtacaccttgctgcgttctgtacatgaagaagttgaagctcaaggaagttaaaagaaaaagagaatg

SEQ ID NO: 1943 - DNA, 332 bp, Homo sapiens
ctgtttcaataggactgaataaagccaaggaaattagattttaaggctaattgctataatgagaagagacaagtatagaacgtgaactagaaatgaaattaagtgcaaaggtttctatatacaggtgcacctcaatttccagaaactcagaaggtaaaagtgatggtttaaaaacgaaaaagaatataatttctattcatttttaaaaatctggcaacaccatttcaagagaagatccattttagctaacgttttacaatcagctaaatgtctaaacatttgagatatcatttactattaaaagtgaaccaaaatgtaacataaattaaaaa

SEQ ID NO: 1944 - DNA, 6053 bp, Homo sapiens
aggagccaagatggccgaataggaacagctcaggtctacagctcccagcctgagcgacccagaagacagtgatttctgcatttccatctgaggtatggggttcatctcactagggagtgccgcacagtgggcacaagtcagtgggtgcgtgcactgtgcgcgagccgaagcagggcgaggcattgcctcactcaggaagtgcaaggggtcagggagttccctttccgagtcaaagaaaggggtgacggacggcacctggaaaatggggtcactcccaccccaatactgcacttttccgacaggcttaaaaaacggcgcatcaggagattatatcccgcacctggatcagagggtcctacgcccacggagtctcgctgattgctggcacagcagtctgagatcaaactgcaaggcggcagagaggctgggggaggggcgcccgccattgcccaggcttgcttactgaaacaaagcagcctggaagctcgaactgggtggagcccaccacagctcaaggaggccagcctgcctctgtaggctccacctcagggcacagacaaacaaaaagacagcagtaacctctgcacacttaaatgtccctgtctgacagctttgaagagagcagtggttctcccagcacacagctggagatctgagaacaggcagactgcctcctcaagtgggtccctgacccctgacccccaagcagcctaactgggaggcaccccccagcaggggcacactgacacttcacacggcagggtactccaacagacctgcagctgagtgtcctgtctgttagaaggaaaactgacaaacagaaaggacatccacaccaaaaacccatctgtacatcaccatcatcaaagaccaaaagtagataaaaccacaaagatggggaaaaaacagaacagaaaaactggaaactctaaaaagcagaccgcctctcctcctccaaagaaatgaagttcctcaccagcaacggaacaaagctggatggagaatgactttgacgagctgagagaagaaggcttcagacgatcaaattactctgagctacgggaggacattcaaaccaaaggcaaagaagttgaaaactttgaaaaaaatttagaagaatgtataactagaataaccaatacagagaagtgcttaaaggagctgatggagctgaaaagcaaggctcgagaactacgtgaagaatgcagaagcctcaggagccgatgcgatcaactggaagaaagggtatcagcgatggaagatgaaatgaacgaaatgaagtgagaagggaagtttagagaaaaaagaataaaaagaaatgagcaaagcctctaagaaatatgggactatgtgaaaagaccaaatctacgtctgattggtgtacctgaaagtgatggggagaatggaaccaagttggaaaacactctgcaggatattatccaggagaacttccccaatctagcaaggcaggccaacgttcagattcaggaaatacagagaacgccacaaagatactcctcgagaagagcaactccaagacacataattgtcagattcaccaaagttgaaatgaaggaaaaaatgttaagggcagccagagagaaaggttgggttaccctcaaagggaagcccatcagactaacagcggatctctcggcagaaaccctacaagccagaagagagtgggggccaatattcaacattcttaaagaaaagaattttcaaccccgaatttcatatccagccaaactaagcttcataagtgaaggagaaataaaatacgttacagacaagcaaatgctaagagattttgtcaccaccaggcctgccctaaaagagctcctgaaggaagcgctaaacatggaaaggaacaaccagtaccagccactgcaaaatcatgccaaaatgtaaagaccatcaagactaggaagaaactccatcaactaatgagcaaaatcaccagctaacatcataatgacaggatcaaattcacacataacaatattaactttgaatgtaaatggactaaatgctccaattaaaagacacagactggcaaattggataaagagtcaagacccatcagtgtgctgtattcaggaaacccatctcacatgcagagacacacataggctcaagataaaaggatggaggaagatctaccaagcaaatggaaaacaaaaaaaagcaggggttgcaatcctagtctctgataaaacagacttcaaaccaacaaagatcaaaagagacaaagaaggccattacataatggtaaagggatcaattcaacaagaagagctaactctcctaaatttatatgcacccaatacaggagcaccaagattcataaagcaagtcctgagtgacctacaaagagacttagactcccacacattaataatgggaggctttaacaccccactgtcaacattagacagatcaacgagacagaaagtcaacaaggatacccaggaattgaactcagctctgcaccaagcggacctaatagacatctacagaactctccaccccaaatcaacagaatatacatttttttcagcaccacaccacacctattccaaaattgaccacatactgggaagtaaagctctcctcagcaaatgtaaaagaacagaaattataacaaactatctctcagaccacagtgcaatcaaactagaactcaggattaagaatctcactcaaaacggctcaactacatggaaactgaacaacttgcccctgaatgactactggatacataatgaaatgaaggcagaaataaagatgttctttgaaaccaacgagaacaaagacacaacacaccagaatctcagggacgcattcaaagcagtgtgtagagggaaatttatagcactaaatgcccacaagagaaagcaggaaagatccaaaattgacaccctaacatcacaattaaaggaactagaaaagcaagagcaaacacattcaaaagctagcagaaggcaagaaataactaaaatcagagcagaactgaaggaaatagagacacaaaaaacccttcaaaaaattaatgaatccaggagctggttttttgaaaggatcaacaaaattgatagaccgctaacaagactaataaagaaaaaaagagagaagaatcaaatagacacaataaaaaatgataaaggggatatcaccaccgatcccacagaaatacaaactaccatcagagaatactacaaacacctctatgcaaataaactagaaaatctagaagaaatggataaatttctggacacatacactctcccaagactaaaccaggaagaagttgaatctctgaatagaccaataacaggatctgaaattgtggcaatgatcaatagcttaccaaccaaaaagagtccaggaccagatggattcacagccaaattctaccagaggtacaaggaggaactggtaccattccttctgaaactattccaatcaatagaaaaagagggaatcctccctaagtcatttcatgaggccagcatcatcctgataccaaagccgggcagagacacaaccaaaaaagagaattttagaccaatatctttgatgaacattgatgcaaaaatcctcagtaaaatactggcaaaccgaatccagcagcacatcaaaaagcttatccaccatgatcaagtgggcttcatccctgggatgcaaggctggttcaatatacgcaaatcaataaatgtaatccagcatataaacagaaccaaagacaaaaaccacatgattatctcaatagatgcagaaaaggcctttgacaaaattcaacaacccttcatgctaaaaactctcaataaattaggtattgatgggatgtatttcaaaataataagagctatctatgacaaacccacagccaatatcatactgaatgggccaaaactggaagcattccctttgaaaactggcacaagacagggatgccctctctcaccactcctattcaacatagtgttggaagttctggccagggcaattaggcaggagaaggaaataaagggtattcaattaggagaagaggaagtcaaattgtccctgtttgcagacgacatgattgtatatctagaaaaccccattgtctcagcccaaaagctccttaagctgataagcaacttcagcaaagtctcaggatacaaaatcaatgtacaaaaatcacaagcattcttatacaccagcaacagacaaacagagagccaaatcatgagtgaattcccattcacaattgcttcaaagagaataaaatacctaggaatccaacttacaagggatgtgaaggacctcttcaaggagaactacaaaccactgctcaaggaaataaaagaggatacaaacaaatggaagaacattccatgctcatgggtaggaagaatcaatatcgtgaaaatggccatactgcccaaggtaatttacagattcaatgccatccccatcaagctaccagtgactttcttcacagaattggaaaaaactactttaaagttcacatggaaccaaaaaagagcccgcattgccaaatcaatcctaagccaaaagaacaaagctggaggcatcacactacctgacttcaaactatactacaaggctacagtaaccaaaacagcatagtactggtaccaaaacagagatatagatcaatggaacagaacagagccctcagaaataatgccacatatctacaactatctgatctttgacaaacctgagaaaaacaagcaatggggaaaggattccctatttaataaatggtgctgggaaaactggctagccatatgtagaaagctgaaattggatcccttccttacagcttatacaaaaatcaattcaagatggattaaagacttaaacgttagacctaaaaccataaaaaccctagaagaaaacctaggcattaccattcaggacataggcatgggcaaggacttcatgtctaaaacaccaaaagcaatggcaacaaaagccaaaattgacaaatgggatctaattaaactcaagagcttctgcacagcaaaagaaactaccatcagagtgaacaggcaacctacagaatgggagaaaatttttgcaacctactcatctgacaaagggctaatatccagaatctacaatgaactcaaacaaatttacaagaaaaaaacaaacaaccccatcaaaaagtgggcgaaggatatgaacagacacttctcaaaagaagacatttatgcagccaaaaaacacatgaaaaaatgctcaccatcactggccatcagagaaatgcaaatcaaaaccacaatgagatgccatctcacaccagttagaatggcaatcattaaaaagtcaggaaacaacaggtgctggagaggatgtggagaaataggaacaattttacactgttggtgggactgtaaactagttcaaccattgtggaagtcagtgtggcaattcctcagagatctagaactagaaataccatttgacccagccatcccattactgggtatatacccaaaggactataaatcatgctgctataaagacacatgcacacgtatgtttattgcggcattattcacaatagcaaagacttggaaccaacccaaatatccaacaatgatagactggattaagaaaatgtggcacatatacaccatggaatactatgcagccataaaaaaggatgagttcatgtcctttgtagggacatggatgaaattggaaatcatcattctcagtaaactatcgcaagaacaaaaaaccaaacaccgcatattctcactcacaggtgggaattgaacaatgagaacacatggacacaggaaggggaacatcacactctggggcctgttgtggggtggggggaggggggagggatagcattgggagatatacctaatgctggatgacgagttagtgggtgcagcgcaccaccatggcacatgtatacacatgtaactaacctgcacattgtgcacatgtaccctaaaacttaaagtattataataataaataaataaatttttaaaaaaagactaaaaaaaaaagaa

SEQ ID NO: 1945 - DNA, 498 bp, Homo sapiens
actctccaactggaagaaagtttaaaaattgaccctcatcttgtcccatatacagtagtaaatctcagatggaatgagtattaatgtaaaaaagacaattttttgaggaaatttaacagacttaactaaaaactggaaactctgacactgtagaagaaagcaagaaccatgtacagttatgtgccacatagcaacatttcagtcaatgacagatcatgcataggtgatcttatgagattctgatggagctgaaaaattcctgttacatagtgatgtcatagctatcataatagaatagtgagattacttatttttttaaatgtactgtagcctaagtttatagtgtttataaagtctacagtagcatgcagtaatgacctaggccttcgcattcactcaccactcacccagggctacttctggtcctgcacgttccattcatggtaagtgtcctatgcaggtgtaccattttttactttttatattgtatttttactg

SEQ ID NO: 1946 - DNA, 935 bp, Homo sapiens
gctctgacaaaccatagttcccattagtgtttccaggcaaaagtagaattgtttgcttaaacagctgtgattaagacctaaatatcttggttgcagtttgtggccaactttccagaaatgtccctgtaagataagtgctgtgtggctggcagtgatttatgggaaaggagaggggaaatcctggttgtcttgtgcctcctgggcctgctgataggcctctgtctgtgacactgatgacacctggaattggctaccttccacatagggcatcagcgagccagaaaaatctagataaacaatgccaggggcaaagaaaacacattaaactatcaggattcagacatcctgaggagcagaagaggatgagagtgcatccaaaacacacacacagaagttgaggaactgtcctcatgcctcctggtccctggtagtctggagaaggacaaggaatgttactttacaggctctgaagtcctcaggttgagcgggacaggtgggtttggcatttctaagcctaaactctgggccttctgagggaatgaggtgagagagcctctgaccccaccgctatgtgggtcacgctgatcgctgagcatctaagctgctccttaggtgctgatcctgtcacctcggtgcattacaggggaaaaagtctcagccacagcctctatgttctgtttgcctataggaccatgatactgttccaggcttcagaggagaagaaatgacccaatttcaagtgcgtactgggggattgagggcatcttcttgctattcctcaagcaagccaagagggttgctatctcagggttttaacacctgtttactcttcctagagtgacattatccagagagcttcctggttcatcccttacttcatctgagtctctgctcaaagtttactgcttgagaaaggtcttttgtaaccattctac

SEQ ID NO: 1947 - DNA, 935 bp, Homo sapiens
gctctgacaaaccatagttcccattagtgtttccaggcaaaagtagaattgtttgcttaaacagctgtgattaagacctaaatatcttggttgcagtttgtggccaactttccagaaatgtccctgtaagataagtgctgtgtggctggcagtgatttatgggaaaggagaggggaaatcctggttgtcttgtgcctcctgggcctgctgataggcctctgtctgtgacactgatgacacctggaattggctaccttccacatagggcatcagcgagccagaaaaatctagataaacaatgccaggggcaaagaaaacacattaaactatcaggattcagacatcctgaggagcagaagaggatgagagtgcatccaaaacacacacacagaagttgaggaactgtcctcatgcctcctggtccctggtagtctggagaaggacaaggaatgttactttacaggctctgaagtcctcaggttgagcgggacaggtgggtttggcatttctaagcctaaactctgggccttctgagggaatgaggtgagagagcctctgaccccaccgctatgtgggtcacgctgatcgctgagcatctaagctgctccttaggtgctgatcctgtcacctcggtgcattacaggggaaaaagtctcagccacagcctctatgttctgtttgcctataggaccatgatactgttccaggcttcagaggagaagaaatgacccaatttcaagtgcgtactgggggattgagggcatcttcttgctattcctcaagcaagccaagagggttgctatctcagggttttaacacctgtttactattcctagagtgacattatccagagagcttcctggttcatcccttacttcatctgagtctctgctcaaagtttactgcttgagaaaggtcttttgtaaccattctac

SEQ ID NO: 1948 - DNA, 572 bp, Homo sapiens
aaatgacctgcccaggtcagaagacattccttccccattctctctggctccaaagtccatgcttatagctatgagttatagttttcaacatgtgttcctggttggctcatgaagtctcatttcatggctcttggaacagctttgtagtgtaaggaagactggtatatctgccttcatcttactaggtaagatggggctaactttgatgatttgggtatatggctatctagtggaatgaattctcttccctagacttcacagtctggtgtttgatgacacagtgctgcccactttctcctccatctacacctgccaggtagcccatagccttgggttctgatgattttcttctttgtgaacaaatctttctgaaacctgaagagagaatgagatcccttcactgcatctgcagagcaatcacacagtagtagacagacaatgctgccaaattgccaccttctagaatatgtcaagaaacaagccaaatggtaggtatcttttgatatttacttgctaagaccaacagggagaaacaggagagccaaaccatcaatggtaaaattgcattggcc

SEQ ID NO: 1949 - DNA, 572 bp, Homo sapiens; identical to SEQ ID NO: 1948

SEQ ID NO: 1950 - DNA, 615 bp, Homo sapiens
ctcggcctcccaaagtgctggtattacaggtgtgagccaccacacctgacctcgtaaaattcttaaacgatctatactcagttgtcttacagttgcctagattcttgttccatttaaagaaactgaaatttgaaatcacaaatgtggattatggatatgatgggttatggatatgatatatttgtaatgaatatgcaagagagaacatttgaaacattaattagtagaaatgtacttaaagaagaggccttggttttttaccgtaatattggcaggtgacatgtatttgttttgagtaaaaatcaaatatttcagttacatttttaaaattacctgatatactgtactttttcatgtaaccagtcagccctgagtcctatttgtgttagataagtttttaccaatcccagaaggagatagaggacaagcttttatatgcttcggctgaagaaaacctttctccaaagaagtaattatctgatcctcctataaagggccagatagtaaatattttagattttgcaggctgaagtagaatcaagggtaatacgtacgttctgatataacaagagagaaaacaaattttgagaaatttcttaattgattaaattcaaa

SEQ ID NO: 1951 - DNA, 615 bp, Homo sapiens; identical to SEQ ID NO: 1950

SEQ ID NO: 1952 - DNA, 321 bp, Homo sapiens
agaccatcctggccaacatggtgaaactccgtctctactaaaatacaaaaaattagccgggcatggtagcggatgcctgtggtcccagctattcgggaggctgagctggaagaatcacttgaacccaggaggcagagttgcagtgagccgagatcacaccactgcattctagcctggctagagaacaagactccgtctcaaaaaaaaaaaaaaaaaaaagaataggcaaataactagagaaaaatagtccagaaacagacctgaatatatataggaatttagaatatgaaagtgtcagtgtgtaggaaggagtgaaatgaa

SEQ ID NO: 1953 - DNA, 320 bp, Homo sapiens
agaccatcctggccaacatggtgaaactccgtctctactaaaatacaaaaaattagccgggcatggtagcggatgcctgcggtcccagctactcgggaggctgagctggaagaatcacttgaacccaggaggcagagttgcagtgagccgagatcacaccactgcattctagcctggctagagagcaagactccgtctcaaaaaaaaaaaaaaaaaaagaataggcaaataactagagaaaaatagtccagaaacagacctgaatatatataggaatttagaatatgaaagtgtcagtgtgtaggaaggagtgaaatgaa

SEQ ID NO: 1954 - DNA, 2687 bp, Homo sapiens
aacagaagccatcggcacagccagcagacagacgtcccctttcaaaggtgcttcccacacatctgttcatcgccccatctgcagttgttgtcaatcttcagggcctgccttctccctcctatccccactgacaccctacaccctaggctcctgactgcctgccatggagggctgtgagtccagcctgcagaatcccctcctgagcagacacaggagtgcgtttacactcgggggcagtgtctggccttccgggggcaaaacgactcactgaacccgcagcccagggccactgggcaagggcagaggccactgcacctgtcctcagactcatccccacacttgaccccataggaactgatgcatctgtgtgagccaggccctgccttagtcagcagaggccactacttgtgccaaatccactgtgggcctgctgtaccaggctgatgctggccaggcgctggatgtcccccacagtcccctgaggcctgactgttgtactcaggccctctcccagagtcctccatcatctccccattttaccctaccccgagccccagtcgccaagaaggaggtgttgttcttccagggtcttcctttcaatgtctgtttccacagtctcatgctatagaagcgctgagccctccagcgtggttggaggatcaagggatgaaatgggacaggaggagaggggtcctccaggctggtgacccctgccctgttggcctgtctcccaagtggcagccttccctgtgggccacatcaggaaacccacggagacagggtgattttgcatctcctggaaaatgagtgggacactcctggccccctggctctccccaccacccctacatatgtgctcagaaggagcccaatgcattgaatggttccactgtcgagccctctaagacctggtttgcctcctaaacctccagtgtgctcctctgataggtgtttaagctacaggtgagactttgaagtccagagaagacagacacacctgaaaaccggtccccatttgggccgaaccttaaaaagcccattgtcccagagtcctagtgcccacggagctgtctgtgtgtcattgtcctgcccaggtcatcaggtgtgggctgaggacaggcccagggcataccctcccataaaggggttttcttctttcctcatttccttctatttgaggacttgtttggggtttagatttgaattttgcttcccctggacacctgggcatcagcatagtgccaccccctgctcctgacctggccagtacttcacagtgctcttgaggtgcggagccagctgacaaataggccagagggtgtgggccagcagcaggttaaagggggaaacccagcagaccccaccccagggcactctcccctactgccttcagccttctggtgcctgttgaacccccaagctgtgccctaagcagacccctgggcaggaccctagccctaagcacacaccaccctgtgctgcaaccatgagaaagtgcccatgccttgggctgtccagaagctcaggagtgatcagagggcaccttctctaagaggggaggttcctggctaagggaccatggagtggtgggcagcctgaaggggctgggcacagcccagctttgcgcacactcgcctggtcccatcattccctaccttggcttaaacctaggaggcctggattttgcagttagcctaatcttccagccccaggcgaggctccctggtgaggaatcagctgagccatcaccacgttttggggcctgtatcctcttccctgagccgctgacgcatccagggctctagtctgcacataaattccctctcagctgggcttgtaaaatcccttctcaccccagttagcaaaaatcaagggaagagcctagtttttttaaaagattcacttaatatccaccccccacctcaagcccaagaccgcccattcaaaaaacaagtatacggcacagcaagggagacccactagattttgagcttacagagacataagggtacttaaaaccctgccggcctagtatttgagcttagaacttttatttaaaatgagccggcagtctctagacacacaccgatcctcaggctagtccgagccctgaggtcaagaatgaaatgcacttcccttctcattttctcaaatagatcttttccagccgtctcacagttgaccccaactttggaactcagatcataggatctcccagaggtttcaggtgttcctaagaagcttctaaaggaagttttggaagaaagactaataggtgtaaacatataaacatatatattatatatagctatatatatttaaagagatctctacatatatatatatatataaatacaactactgtactctctgcatctgtacaaagtatgagttaaactgcccaggtagtgtgagatacgtaatgcatgaatgtgaatatcctgaaatctgccttcttagcaacgtgccgcgtgtactggagagaggacagttgctcctgggagttctctcaatgggcaaatgtacaagttgatgccgtcttatccaccaacaagccattaaggttggtttcctgctgagacttttgtaccggaagcgagaccggcagcactgggggtgtccatatgccacttatgaggaagaaagcaccatgacttttttattttcaataaaaatatagagatgtc

SEQ ID NO: 1955 - DNA, 235 bp, Homo sapiens
cccattaccaccagcatcaccactaccaccaccaccccattaccaccagcatcaccactaccaccaccaccccattaccaccagcatcaccactaccaccaccaccccattaccaccagcatcaccactaccaccaccaccccattaccaccagcatcaccactaccaccaccaccccattaccaccagcatcaccactaccaccatcaccccattaccaccagcatcaccacta

SEQ ID NO: 1956 - DNA, 509 bp, Homo sapiens
cggccactgggcacaagcgaggggccacaactcagactctctccacccctgcctggcttccctggggcttcagagttagctcagtgagggccagctaagagccctgtgtgcccagagccagtgggcaggtatatccccctaactgggctcacagcccaggggacaggagctcagtgcaggaactcagggaagggcttgtgtcccaggcatcagggacatggagggaacatggaagttattaaaggcactcctgttacaagcgcccctcgcacctgggattctgtgagctgctgttggcctgcatacgcagtagaagacgcagtagacacgcagtagaagatggccattgttacaatgactgtcactgttgtctttaatgaaagagcctgtgtgatagtgagggctcctctgtccactggccccctcctggggcctgcctgaaagctggtgagggttcagtgggacatctcaggcctcacacccactcctgtgcaccctcagcccaggcg

SEQ ID NO: 1957 - DNA, 2063 bp, Homo sapiens
tactgtttggtataggttttatttttaagtaaaaaaaatgaatcatagccaaaacaaaatgtcttgcctttgaatggtattttaagcttaaggggaaaaaagtctttaatgatgaacatattttcatttttcaatgtttttaatttttaataaagatttttaattaagcttcagtctctaagcagtttttaaacttaggtttcgtgatcctttgacctcatacttttagatggagtcagttatcttcaaaacatgacaaatttcagaatccattaaaaattattttattcaaattatgttttccaaaagagagggttctgtgctagtcgtctttgaaagttttcatacctagaaaagaaaacacatatatttacattcacaagaaaattaaaataggatctttcattaactgccaaatgacttatccaaaacaattttacatgtcatttctaaaaagctataaaaaatctaaaaagataatctggaaatgtaattattcttataaaaagacagcaagcataggaatttaaatatcggggcagttttgattagcttttatcagagagcacaaatcataagaaattttagtaattgtttatcttctgcaaatttaagacctagaagggacctaaggaaaaaaatcaaattcaactcctatttcctcattccacagatgagcagatgagagaaatttgctcagggtcacatagctacattatgccaaaattcaaacctagtgcattccaatgctctccatgctacaccatggtaccacttctcaacaaactcttcctaggcatcctcccatctctaggatactcaaagtgaaaagaaatatctataaaacacgggaaagttggaaaatagattcattagccattcatgtacacagtgcagtataaactactctcatagatggtacttctaaatgaaaatacacaaatatttataagctttaatagtggtccctaaaacataggcaactatattttcctgtctttataaattcataatggcgacaatataacaaaatatttagggtaagaactgtttctcatcagatctctatagtacatactttaatggcatgcagtgctgatgttcacaataaaagaatatgtttaaatgtcaaaaaaggaatatattcatagacaaaatagatattcagttataaaaagccttaatattggagacagaaaatgcctcataccatttcagaaccacatttgccggaatgaacatttcagatgggcttggtgtcatctgggcctgagagacagcaaatgatgaagcaaaattgtagaaattgtccaacatcttttgtgtgaactgaaaagttaataatagattaatggattatactgaatacttcatttagaactcaatatttttaaattaaaagtgttctcacattaacttgtttatagggagtgtcagttctaagagagtctaatgctgaaagctggctgggtgcggtggctcatgcctgtaatcccaaaactttgggaggctgaggcaggagaatctacttgaggccaggcattcaagaccagcctgtgcaacatagtgaggccctgtgtcaaaaaaataaaattaaataaatgaataaaaaagaatgttaagagtaatcatacatacaatgacactgtgaaatatgctactcactttggggaaaaaaaaagaaaaaaatttttcttcaaaatattttctttcatctccatgtctgcatccactatgtccctcctcaattatcactctcctcaaatcaacctattttctcatataaaatagtaaccatctctaagaagtcttttacctgccagaaagataagagtttacatattataaaggagcaactggttatttccattgctggaaagaagataaaggcagcactattccatttcctctgtttcctaatctgtttcccttccttgactctaaaatgatcaaattcactaacatactccaagtctccttggtagaagctagaagtaaatggactcacatttcctgagaatcaaatgggcttaagtactaaccctaaaagtaactgaacttct

SEQ ID NO: 1958 - DNA, 3796 bp, Homo sapiens
gtttttttattcagttgttgaataatatgaaggcagtataatccaagagactctgctgcgaaggcacctgattaatatcaaaagttcagtaaagtcactaacagtttcttcgtttgtttttgagacagggtcccactctttcacccaggctggaatgcagtggcacaatcatggctcactgtagccttgatctcccaggctcaagtgatcctcctgcctcagcctcccaagtagctgagattataagcatgcaccaccatgcctgggtaattttttatctttttataaagacagggtctcactatgttacccaggctggtctcaaaattctaggctcaagcaatcctctcacctcagcctcccaaagtgctagagttacaggcatgtgccactgtacccagactaaagtcacaactaaaagatcaatattaggaaaaaaaaaaaaaatcaacagcagtcctccacaccagtgacaataatttttaagtgtaactgaaatctttaaaaggattccattcagaatataaacaaagcattttctccaatacctagaaaaaatgctaagacaaactagtaagatttttgtggaaaatattataaagactactaagagacagaaaagaaaacaaaaggacctatatataccattttcaatggaaagatataccatgttcaatggaaagacataacatgtcacatatggaaagacaatgtggtaaaggtggccaattctccccaaattaaacccatatatccaatgttattaccaacaaaattccaacaaggttcttcatgaaacttgacaagctaatactatttaatgaaactcaacaagctgatataattattatgaagaatacctacacaattattatgaagaatacctatacatattttgatgactgtgaggaggaacttgccccactggcaaagagacaggcaaataaactaattggaataaaagagacagcccagaaataaacctaagcatatatgacaaagatgctattactcatggtaaaaaaaaaaaaatgggacaaattactcaattcatggggctaggactagttttccataaggggaaaaatgaatttaattcccttaccatactgcacacaaacatattcaaaaagtaaaccttaaggctttaagaactgaaagacaacatcttaggctctgcttgaggccaggagtttgagaccagcctgggcaacatagcgagacccccagtctacacacacacacacacacacacacacacacacacacacacacacgaacatctttatatctttacatatcaggacagagaaggatttctcaaacattaaaaaacccacaaatccacaaatcataaaagaaacaatacatttatctatatacaaatatagtatatctgtatgtaaaagtcactataagcaatgttaaaagacaagcaccatgctagaaggagaaaaatgcaatgtatttacaaaggattattatccagaacacataaaggcatcttaggtttttttcccaaaagactaaatttaaaaagtgccaaaagcaatacaacagaaaattggacaaaatatataaagtcaattcctataaaaggaaatacaaacacagccaaaagtgtgcaaagatgctcaatatcaccagtaatcaagaaacacaaactaagtatgatattctaatttcactcatcagtttggcaaaattttaaaggtctgataaatgttagtgagaacatatgaaaaaggaaatgaaaaaaactggctcatttatacaatggcacactatgaagcaatcaaaacaaagtatattccatgtatcaacatcgataaatctttaaaataatgttgagtgaacaacagcaagttatacagaataatactatttatattcatttttaaaacacacaaaagaacaaatcaacaagaaggaaaaacaaaggattcaacacagaagagaaacaaaaagaatttctgtagtaatggtgaaataataccttgtctatggctatacaataggtccagagaatagtcagtcaacagtagaacaaaaaagaaaggacagtctgggcaacataatgaggccccatctctacaaaaaattaaaaagttaggtgggtttggtgatgcttgcctgtagtcccagctaccagctactagtgggagcccaggagtttgaggctgcagtgagctgtgattgcaccactgcgttccagcctaggcgacagagcaagaccttgtctcaaaaaaaaagaaaaaaaaaaaaaaggagaattccaagtggaatgtttccgagaccaatttgaaactgatatgtttaaataaactgaatgagaatttacacttagtagagtttgagcataaattagaagtagaaacatagaaatctatgcaaaggaaaaaaatgaggaaaaatgaaaaattatacaagaaaagaaatgtaatcgttgtaccacacatagctcaattctgaaaaatatttaccttctcataatactgtaaacttttaatactgatttaacaaaaatgtatactgataaggtggggagaaaagaagtatgtacatgttgggaagcagggaagtgagagagtttcatcatgtcttatattagcaaataaatagaaaacatctataacagaaaaactaacagattttaagcaaggttttttctgatatatggaaataacagacactaggaaaaatagattaaaaaggggagggaagttgaaaatcatagcttctaaggagcagaatagaagtagaatgtaagagtcataacagaggacagctgtttcacatattacactatttgaggctgggcgtgatggctcacgcctgtaatcccaacactttgggaggccaaagtgggtggatcacgaggtcaggagttcaagaccagcctgaccaacatggtgaaaccccatctttactaaaaatacaaaaattagccaggcctggtggcacgcgcctgtaatcccagctacttgggaggctgagacaggagaattgcttgaacctgagaggcagaggttgcaggagccgagatcacgccattgcactccagcctgggcaacagagtgagactccatctcaaaaaaactatttgactaatatccagaatctacaaagaacttaaacaaatttgcaagaaaaaaacaaccccatcaaaaagagggcaaaggatatgaacagacacttctcaaaagaagacatttatgcagccaacagatacatgaaaaaatgctcatcatcactggtcatcagagaaatgcaaatcaaaaccacagtgagataccatttcacaacagttagaatggcgatcattaaaaagtcaggaaacaacagatgctggagaggatgtggagaaataggaacgcttttacactgttggttggcgtataaactagttcaaccattgtggaagacagtgtggcaattcctcaaggatctagaactaagaaataccatttgacccagtgatcccattactgggtatatacccaaaggattacaaatcatgctgctataaagacacatgcacacatatgtttactgcggcactattcacaatagcaaaaacttggaaccaacccaaatgtccaccaatgatagactggattaagaaaatgtggcacatatacaccatggaatactatgcagctataaaaaagggtgagttcaagtcctttgcagggacatggatgaagctggaaaccatcattctgagcaaactatcacaaggacagaaaaccaaacaccgcatgtcctcactcataggtgggaattgaacaatgag

SEQ ID NO: 1959 - DNA, 490 bp, Homo sapiens
ggttggggtgggaggaggcagagaaagaagcatgtgtaaaggctcagagatatcaggtgtgcacgtgcctgtagtcctagctactggggagggtgaggtgggaagatcatttgagcccaggagttctgggctttagtgcacaatgctaattgggtgtccacactaaatttggcatcaacatggtgacctcccaggagtgaggaatcaccagtttgcctaaggaggggtgaactggcccagatcagaaatgaagcacttccgtgctggtcagtagagggatcatgcctgtgaacagccattgcactgcagcctgggcgacaagagggaaactccgtctaaaaaaagaaaatagctaggcatgggcactgtaatgcatgcctgtagtcccagctactcaggaggcagaggtgggaggcttgcttgggcctggggggttatgcactccagcctgggtgacagagtgagactccgtctccaaaaaaaaaaaaaa

SEQ ID NO: 1960 - DNA, 490 bp, Homo sapiens; identical to SEQ ID NO: 1959

SEQ ID NO: 1961 - DNA, 6226 bp, Homo sapiens
gggaacctggagccttggggtgtgagttgggggtcagtgtctgtctctcttccccagctcgtgccattcctcaccaggaactacctcaaacaaggcttcatggaaaagactgggccaaaggtaccttctatcactccctggggaacttaatatggtttaatgtatatagaaggtttcatgtgtttatgggatgattgttaagaggacagtgaaaggtgttaggccaagcttgtccaacccacagcccatgggccacatgcaacccaggacggcttggaatgatgcccaacagaaattcataaactttcttttttaaatttttttgagacagagtcttgctctgtcacccaggccagagtacagtggtgtgatctcggctcactgcaacctccgcctcccagattcaagcgattctcctgcctcagactcctgagtagctgggattacaggtgcccaccaccatgcccggctaatttttgtaattttagtagagatggggtttcaccatgttggccaggctggtctcgaactcctgacctcaagcgatctgcccacctcagcctcccaaagtgctgggattacaggcatgagccaccatgcccagccaaattcgtgaactttcttaaaacattatgagatatttttgcgattttttttttttggctcatcagctatcattagtgttagtgtattttatgtgtggcccaagacaattcttccaatgtggcccagggaaggcaagagattggatattcctgtgttaggcaatcatgaaagcaagccttgggcaggtggaaaaagcagtcaaagggttgttttcagagaggcgcagcccctccgcctggttcttgttgctgggctttctctccctgacctaggttagaatttggccaaggccagcactttcagccttgccaagcagtagccacttctgattttttccaacttcctttccggcttctttgtctacagcctgaaaaagaggaaggtgcctcttccaagttgaggcagcagggtgaagctggcaaagggtatggtggggttggaaggggaatgggcagaaccttcagagcctgagggctcctatccaggccccagggagaagcactaggatgtctgactgaggaggctgggctggagaaccagtgggactggccagctcctttggtttgggctgggctggcccctgacctctatcctcagaaactgacctggtcatctgtggtaagaagttccctcttttgcagcagaaagaacctttcaagaaaaggtggttcgccctggattgccatgagcggaggctgctctattacaagaacccactggtaagagccactcctgctccctccccagggcttcctcaaacattgctgggtggtgcttgtctggaactatgtgaaagctacagataaacacatctcccagagccccagagctagagaaaccttgagaggaaaacctctaccccttgtttttgtttctcttgagtaatctcctatggcatgaagcttctcctcgctttcaggaagtctattatgagtatccaaaatgctgcccatggtagttaaatatggtgtatctcttcctctagtctccagggctcacttctaaccaagaggccgtgatgtgtagtagttaggagtgtggtggactctagaaccccaccgtctgggctctggtctcagccctgccacttgtagtagtgttgccttgagccgtgtacttagtgctctgtgcctcggtttcctcctctgaaaaacaggcttaataagaatgccttccccagaggttgccatgatggttatttaagttactatatataaagcattgtaattcctgatgctgattttaataagtgctccgtaaatgttaggtatcacttatttttttttttttagagacagagtctctctctgtcacccaggctggaatgcagtggcacaatcacagctcattgcaaccttgaacttctgggcccaagttatcttcctgcctcagcctcctaagtagctcagaatacaggcatgcatcaccatgcccagctaattaaaaaaaaaaaatttagggctggatgtgctgccttttgtctgtaatcccagcactttgggaggctgagacaggaggatcgcttgagcccagaagttcgagaccagcctgtgcaacatagtgagatcccatctctacaagaaacttaaggccaggcacggtggctcacatctgtaaacccagcattttggaaggctgaggcggggcagatcacgagctcaggagttcgagactagcctaaccaacatggtgaaaccctgtctctactaaaaatacaaaaattagccggacgtggtggtgcgtgcctgtaagcccagctactcaggaggctgaggcaggagaatcgcttgaaaccgggaggcagagggtgcagagggtgcatgccattgcactccagcctgggtgcagagtgagactccgtctcaaaaaaaaaaaaagaaagaaaaaaaaagaaacttaaaaattagtcaggtgtggtggagcatgcctgtagtcctagctgcttgggaggctgaggtgggaggattgcctgagcctgggaggttgaggctgggatgagccatgattgtgccactgcacttccagcctgggtgacagagtgaggccctgtctccaaaaacaattcataataataattaataatttttttttgtagagaaggggtctcactatgttgtcccggttggtctcatattcctggcctcaggcaatcctctgccttggcttcccaaagtgctaggattacaggcatgaactaccaggcccaccctcggtatcttttcaatagatgatgtgtatgatttattttagggttttgatctttcaaattctgggtcccacttagcagaaatcccagcagggacctcatacccctttcccaaaataaagcttggaggctgtcagggctgcagggcccctctgccctgggggcaccctctgatgaccctgtactctccattttcaggatgccttcgagcagggccaggtttttcttgggaacaaggagcagggatatgaagcctacgaagacctgcccaagggcatccgaggaaatcgctggaaagccggactcaccattgtcaccccagagcggagatttgtcctcacttgccccagtgagaaggaacagcaggaatggctggaaagtttgcggggtgtcctgtccagccccttgacgcccctcaaccggcttagtaagaagcaggaactgaggggtgttcttttggacaagggcagaggacagaaaattgcttcttcacttaggttcagctttgataccacaaaagattcctgattcctgactatgctcttttcattgtcttctcttcctgcaaaagaaaagcacagacatgccattattgccaaaaggtctcctctgtccactctgggttcccctaaccgagcccttccccaggagcttttagaggagtttggccctggcagaacccctgggtgctgtctgtaccccttgcggtgtgggggctaagcagcttctctttccctccaccgtgctctatgctgatcctttttctcgtgagaaaacgctggcctgttattattagctaaggtcacacccgctgggcagctcctgggatttttggattcctccccactccagagggaaggctatttctagtggcttcttttctttgagtcctcccttctgtctgcctctctcctgttcctcctctttaccagtagggcttcctcaatgctgacagccctgtgaaaaaaggggagacatgccgagctccggcaggaaactgctggcccaggacctggcttctggggcacaaaggagaatttctgtgtttggaaaagtacagactgagcaggtgacccccgcacagccccttgggggaaacacttgtgccctttgagtctgactgatataaacacagactctcttgactgtcccataaaggccaaagccagagaacctcagaaagggacttgcaaattgtgagtgaggcatatcagctggtgctttcttttctctgtgggctgccatttatgaatctcttggtttctctctgtctctgtccctccacttttctctcctttgctggtgtgtgcattccctctgacgccctggctctcactctttcattctgttttttattctggctccctctgtctttgtgtttttttttttaattttctttttttgaggtggggtcttgcactgtcacccaggctggagtgcagtggtgcgatctcagctcactgcaacctcttcttcctgggctcaggcaatcctctcacctcagcctcccaagtagctgggactacaggctcgtgacaccacatctagctaatttgttttgtatttttggtagagacagagtttcaccatgttgctcaggctggtctcgaactcctgagctcaagtgatccacctgcctcggcctcccaaagtgctgggattacaggcatgagccactgtgcccggccatggctccctctgtctttgtacgcctgtccctttgctgtccctctcctccacaggacagcattggcatggccacctccctcagccctcttcatttcccttgcagctgcatcaacagagagtggccgcagcagcaggtgacccattaactgaggaactggctgccactgaacacctggaactccttgtgggaagaagtttgcacctcggccctggctgcccaccatcagtgccccgcagtcagcagccattcctggcagtgaactctgccaggactgaagctgtggctttatccatcagctccctgggccttccccgcaacccacctcggggatctgaggatctggtgcatagatgaacatctatcccctcctcccccatacacacctaggcttgaaatgccctacaggcccagaactttctcacatctgaaatggaggcattgcaatgaaaaggcacccacagcatcatgcaagtggcatcttgtaaaaaaaaaaaaaaagtttaatctgaatctaaccatgaggaaataatcagacaaatccacattaggggcattctgctaaacatctgacccagactcttcaaaaatgaagagtgaaagataaagtagtcaatggccgggcgcagtgagattgcgccattgcattccagcctgggtgacagagcgagactccgtatcagaaagaaaaagaggaactgaatgaaatctcagatggctgaaatgttagagaaacagagcaccaagtcccctgctctgtgactcgttgttcctttcctctgtcttcaagcaccacgcagaaatacactggatgttctctctttgcttcaatggagacccaaggagctgggaggtctcttaagagactctctgattctccgtggctgggtgtgatggctcatgcccataatcccagccctttgggaagctgaggcaggaggattgagaccaggagttcgagaagagcctgggcaacatagtgagaccccatctctacaaagaaaaaaaaattagctggacatggtaatgaatgcctgtagtcccagctactccggacactgatgtgagaggatcacttgagccagggaggtcatggctacagtgacccctcattgcaccactttacttagcctgggtgacagagtgagaccctatctcaaaaaaaaaaaaaatctatgcattgtatgggactttcctttggatcccccaatcaaaggataagcaatgcgtaagcctgtgtccttcctgaagcttctcgactgcccagatagggaggtgagtcctctctatctcctctggctctggaagcaccttgaaaatgtgcattttcaaggacacttgctgggttgtgcattaagggccagtttacttgtctgcctctttgaccacctgtgaactctgttgggtgtactctgctaagttctggggatgaggaaattaataaaggtacagtcttgccttcaaggaacttatggtctagaggagaagaacgagaagtatagataggcagtaacaaagctacttgaagaggccaactgggattctaagggtgggaaagaacagacacaagagataaagtcctaatgaaatggagtgcttggttttggatgattccttcctcaaggaagagtatgcttctatactcttatattaaatccctttttccctttttggcttgttagtgcaaggaagtttctattacttgaatcagtcctgacagataaagt

SEQ ID NO: 1962 - DNA, 104 bp, Homo sapiens
atcctagcactttgggaggccgaggcaggcagatcatgaggtcaggagatcaagaccatcctggccaacatggtgaaaccccgtctctactaaaaatacaaaaa

SEQ ID NO: 1963 - DNA, 32169 bp, Homo sapiens
gagacccacagaggttgaataggttgtccacagtctcgtagctaccaagtgacaggccacgatttgatctcaggccagtgtgttaaactccaatttgcgtgctcctgtccctccccgcgcgtcggcggagctcggggccggactggacctgccgagggaggggcggacagtcctgacggtgcggggcggggctggcggctgcccaggcctggctgaggcgccgcggccgggtccctctccacctgccgggcggagcgcacgggccatgggctgagccccgctgagcccgccgggccggccatgggcgatcgcgagcgcaacaagaagcggctgctggagctgctgcgggcgccggacacaggcaacgcgcactgcgccgactgcggggcggcaggtaagggcgcggcggcgcgggcagcgcgagacccccggccggaccccaggcccacccgactcctcccctcggccccaccgggtcccgccctcggccccctggacccagacgtggcacctgcgggccccgacccctcccacccacaccgtgaacctctcacccgagccccgagggccgtctccaccacaccctgccccggcccctacgagcccaggctctgctcccctcgcgggaccagatgcgcatcttcccacgtgcttggacccggacacgagagccggcagcctagagcccttccagtcccgctctcttccctggccaggcacccgaccgcccgagtccgggctctcgatgtctgcgcacccaggcgcgccccacgccctcggactcagacatcccagccagggctaaacgtcgggcccaggccgccgacagtcctgtgccccctgcccgctcccagacgccccccgaaggcctccccagcgccccacctcggggacgccgagggccccctaactcagcctccccacctgcagctccgcgccgagccccgcggtgcgccccccgcgccctcctctcggttccttctgagtcccttcacttccacgtcgcgcagcctcagactctctccccgggccctgaactgcctccaggatcttcaccccggtcgccgcgcagcggccggtgggctaaccagaaggtgccaggctggccgcttagttcgccttaggtgggagaaggggcgccccacctgccccagtgccccgagcccagccctggtttcttcaccgcgctttccgctcagctcctctcctgcctcatcccctgcagatcccgactgggcctcttacaagctggggatcttcatctgtctcaactgctgcggcgtccaccgtaacttccctgacatcagcagagttaaatctgtgcgacttgacttctgggacgacagtattgtggaggtagaaaggcatgcccgtggagagccatggaactgcgggactggagtagaggcagcgggcagggggctcccattctacagagggggaaactgagaaccagagaggggcaagtctagctagaggaaacacagcttataagatggcagcttagacagaggccgagagttcaaattctggctctatcatttgcttacttttttttttttttttttgagacggagtctcgctgtgttgtccaggctggagtgcagtggagcaatcttggctcactgcaaccgctgcctcccgggttcaagtaattctcctgcctcagcttctcaagcagctgggattacaggcgcctgccaccacacccggctaatttttttgtacttagtagagacggggtttcaccatgttggtcacgctggtctcgaactcctgacctcaggcgatccaccacctcagcctcccaaagtgctgggattacaggcctgaaccatcctgaaccgctcctggccatcatttgcttacctataagctgggaggccctgagctaggtactttgacctagctgtggaccctcagtttccacatctgtattcaagggataccaccaccatttctctttttttctttcttccttttttttttttttttttttttttgagacggagtttcactcttgtcgcccaggctggagtgcaacggccaatctcggctcactgcaacctctgcctcttgggttcaagcaattctcctgcctcagcctcctgagtagctgggattacaggcacccaccaccatgccccgctaatttttgtattaatttttagcagagacggggttttgccatgttggtcagtctggtctcgaactcctgaccttgggtaatccaccctcctcggcctcccaaagtgctgggattacaggcgtgggccactgtgcctggccactaccaccaatgtcacagcactgttgtgaagatgattgtaggctcagtccagacacaaagaaagctgtcagttaacagttgctgttgtacgggtgtggtggctcacacctataatcccagcactttggggggctgaggctggtggattgcttgagcccagaagttcaagagcagcctgggcaacatggtgaaaccccgtctttacaaaaaatacaaaaattagctgggtgtgatggcatgcgcctgtcgtcccagatacttcgggggctggggtgggaagatcacctgagcctgtgagagtgtggctgcaatgagctgagatcgcaccactgcactccagccagggtgagagtgagaccctacctcaaaaaaaaaaaaaaagttgctgttatcattagtgaagtcttggactgggggaagggaaataacctgatttgtggtctaaagtcctcctttccccctaggcagaaagaggaccactttgctctcctgccctctgggggtggaggataccctcagcctgcatggtaattccattttggtcagaaaacctccagagagcaggcagttctgcactgtgcgggttggctgagggtttccaggactattggggaagcaggctgacatttactgaatgcctactctgtgccaggtactgtgctagacagcaccggactggaggctttagtgtgaccttactaagtgctgggtcttgggagagaacaatgaacaagataaggtccctggccatacagagcttacattctagtgtgggagaaaggctggaaaccagtaaaccagcacataaacctgaaggattttatttgcaccttataactcccatgttatattttcttttttgttttttttgttttttttttttttgagacggagtttcactcttgttgcccaggctggagtgcaatgatgcgatcttggctcactgcaacctctgcctctggggttcaagcgattcttgtgcctcagccttctgagtaactaggattacaggcatgcaccaccatgctcggctaattttgtatttttagtagaatttttactagagacagggtttcaccctgttggtcaggctggtctcaaactcctgaccttaggtgatccacccgcctcggcctcccaaagtgctgggattacaggcgtgagccaccgtgcccagcattttttttttttttttttttgagatgcagtctcactctgtcacccagcctggagtgcagtgagtggcacgatctcggctcactgcaacctccacctcctggattcaagcgattctcctgcctcagtctcctgagtagctgggattacaggcgcccgccaccatgcccggctaattttttgtatttttagtagagatggggtttcgccatgttggccaggctggtcttgaacacctgacctgaggtgatccacctgccttagcctcccaaagtgctgggattacaggtgtgagctacagcgcccaatcctctgttatatttccttcttcttcttcctcctcctcctcttcttcttcttccttcttccttcttcttcttcttcttctcttttcttttcttttcttttctttctttcttttttttttttgagacggagtctcactcactctgttgcccaggttggagtgtagtggtgtgatcttggctcactgcaacctcctccccctgggttcaagcaattcttgtgcctcagcctcctgagtagctaggattacaggcgtgcaccaccatacctggctaatttatttatttatttgagagagagtcttgctctattgcctaggcttgagggcagtggcaaaatctcggctcactgcaacctctgcctcccgggttcaagcaattatcctgcctcacctttctgtgtcctggctaatttttgtatttttttagtagagacaaggtttcaccatgttggtcaggctggtctcaaactgctgacctcaagtgatccccagccttggcctcccacagtgctgggattacaggtgtgagccactgtgcctggccattttcttcatttttacgggtgagattccaagggtcactcatcaaataaatggcagtcaggatctgaatcctgctctgttgggatccaaagctggcgacacagcctagcggcccctgcagaggagaagaggagcaatgctcctctcctgcaaaggagatgcccaagcgatgtgaattgaaaacctggtgtttcttcccacttctgccctcaccctagctatgccactgctgccagggccacttttggtgcatcagcctctgggtctcttgggtgccaaagggccctactaatcatcctgacctatgcactccatgaggcgagcacccacttcttccatcctccaggtacatttatctcctgcagactttcagggctgctaggggtcctggccatctgtggaaggcatgataggaagaatatgagctttggagtcaggtctgggttcaaatcccagttctccacttatagctgtgtttccttgaacaagtaacctaacccgtctgagcctcagttgactcatctgtaaaatgagtacagtgatatgaaaatggctgagaggacccagtgagctgatgtgtgagcactgtggagtcctgtgcccatatgaggcatggttatatctgcccatgattgttacaggctggggcttcccagcagtatggatgaccaagcccggtgggacatctccttcttggaggcagtttcttctgactcagcctaagtcagtggcctcatagtttcatttcacgttttttcaagttctaatattacctcaggttgctgttgtcttgcagtttatgatccacaatggaaacctccgtgtgaaggccaagttcgaagccagagtcccagctttctactacatcccccaggccaacgactgcctgtgagtgggtgattccttagggactgggtgaggggtctgtcctggttccacctcctccccctctccatctttggtgtcttcatctgtggtggtctcttctatgggcctggtgcgcaggtggatccaggaaagcactggataccatcacagagagcacatgggaagactggtataagcctctttctgcctctgttgcttgggcgtgtctcttcctttctctgggcctcagtttccacagctcttaaatggaggatttttctgtatgatctctatgatttttctctatgatctctgcctgtgacattcttgtagcttacagatggtggctaacttgataagagggggtaaacactagtatcttactagaccaagtgtgtttcagctacttcctttagagaaatatgtctagagctggccaggcacggtggctcaggcctgtaatcccagcactttgggaagccgaagcgggcagatcacgaggtcaggggatcgagaccattctggctaacacggtgaaagcctgtctctactaaaaatacaaaaaaaatttagccgggcgtggtggcgggcactggagtcccagctacttggaaggctgaggcaggagaagggtgtgaacccgggaggcagagcttgcagtgagccaagatggcgccactgcactccagcctgggcaacacagcgagactccggctcaaaaaaaaaaaaaaataaaagatagaaatatgtctagggctctgccacctaagctcgggctggctctaaacaacttgcctgagctgcagatccctaaatactaaccataaaaataagaataacagccaggcacaatggccagtgcctgtaatcctagcactttgggaggctgaggtgggaggatcgcttgaagataggagttcaatgtcagcctgagcaacatagcaagaccctgtctctacaaaaaataaaataaaatgaacttagccagggcatagtagcacgtgcctgtagtctgagctactaggaagactgaagtgggtggattgcttgagcccagattgcagtgagctaggatcacatgtgtcactgcactctagtatgagtgacagagtgagacctagcattagaaaaaaaaaaaaagtagctactggctggatgcggtggctcatgcctgtagtcccagctactcaggaggctaaggcatgagaattgtttgaacccggaggcagagggtgcattgagccaagatcacgccactgcactccagcctgggcaacagaaggagactgtctcaaaaaaaaaaaaaaaaaaaaaaaggccggatgtggcggctcacacctgtaatcctagcaatttgggaggccgaggcgggcggatcactcgaggccaggagttcaagaccagcccggccaacatagtgaaaccccgtctctactaaaaattaaaaaattagctgggcatggtggtacatgcctgtagtcccagctactcgagaggctgagggaggagaatcgcttgaacccgagaggtggaggttgcagagattgcaccactgcactccagcttgggcaacagagtgagactttgtctcaaaaaaaaaattgctactaatattattgagctttgcttaagtactacgccctgtgcaaaatgcttatgtgcatgtatttatttaattctttcaacaaccctacaagtactgctactatccctatgctatagatgaaaaaacctgaggtttgtggaggcaatactggtctagcctgtctgacaccagggccagggtgactgtttcatggaattgggataattttatataagaggggggctttgaagcagcaggagggttcaggtcccctggaggtgagggttagtgtggcactggtacctagtggccctggacctctgcagatctgactgcctgagcctacgactccttcccagggacttagactccccaccagggctgctagacagtatcttgtgtaaatggggagaaggaatccctttaggctgacccagcctcatagcgggtatgtctggcaaacagaaagcagctgcatttcagctgccgagcctcagcaaggtgcttttgggcagtacacagactatataaccatacctagtggtcttgtaatttctcagtgcttagacaattaagagctagtaatgtactctggagtggctggggaagcacagctttctacttggaagacctcagttttgtttcctagctctactgtgacctagctgggaggacgtgggcaagtcagcaaatctctctgattgtcaacatcctcatctctgaaatgtaggcaatgatgcctgcatcatagcatacttgtagagattacatgagataacttatgtagaacctttcacatgccacccgacacacgggtttgaatccatttcactgtgtctgcttcagaatgctacctgtccatggccagctgtggggtgtgctgactcgagagggcctgtctcatcctggctcgctgctgccactctgtcctttgctccaagtgctcagtgaacacgtgcgctgtgctaggcttcctgccggcactaaacagacattacccaccatgactccagcagcagccctgcactttaaccctttttgtctgagtactaatggccaccttcaggaccaacatgggtggcccttggtctccattccttctccctgctctgatcttgtgtcccagggtttccaccctcatggtgggccaggtgattctcctcagtgatctgtgggctgtgcactaggaatgactctctctctcttttttctttctttcttttttaaatatagagacaaggtttcactctgttgcccaggctagagttcagtggcacaatcatggctcactgcagccccaacctcctcggctcaagtgatcctcccacctcagcctcccaagtagctggaactacaggtgcatgccaccatgcctggttaatttttgtatttttgtttgtttttatttttgtagagatgaggtttcatcatgttgcccaggctggtctcaaactcctgagctgagctcaagccatctgcctgtgttggcctcccaaagtgctgggattacaggcatgagttaccatgcccagcctggactcttgattgtaagcgacagaaaccttatttatttatttatttatttatttatttatttatttatttttgtgacagagtcttgctctttcacccaggctggagtgcagtggcacaatctcagctgactgcaacctccacctcctgggttcaagcgattctcctgtttcagcttcccaagtagctgggattacaggcacgtgccaccatgcccagctaatttttgtatttttggtagagccggggttttgctatgttggccaggctggtcttgaactcctgacctcaagtgatctgcctgccttggcctcccaaagtgctaggattacaagtgtgagccactgcgcctggccagaagcccagtttaaaccagcattaaaaaaagaggattttatgggttctggggatcagactacctgaaggacagtggtggagctggcctcaggaaggaccaagccaggagctcacacaccatcaggtctctcatactctctctggctctctttcctctttctctcagacaggcttccttcacacagctggcagcaaggccacaagcaggtgccaggctataccttccagcgtgactctggagaaagctccatcaatctctccttcacttttgaccctctcagtccacacagcccagagcagcaaagagctctgaatgaccaggttgggccagatgcccagctctaggtcattcctgtggctatggggtaaggtcatatataccttggaacacttccctggaaaaggtgagcaggaaccaaacaattaaaataactccactctcggctgcatggtttttctgcaggactcacggatgacaatctctgattgagatcacattaaacacctactatgtgctgagtaggtgctaggccctttatatacatttaaacctctcaacaaccctgagggctaagtgagtataacaatagaggtctattccccaaattcagaggagttgggtaacttgctcatggtcacacagtggataaatgatagagtgagaccaggtcccaggtggtcagatcctaagacgactgctttgtccagtgtagcctgcccagacttcatgggcaggtacaggaagaggctcctggactctcctgcctaagctcatgaacacacagtgggagcaggtggtgtagatggtccagaggagccagtatctgtctcattgacctagagagctgatactgggattggaacaactcggtggttctcatatagcccactgggagaaatatttcccccagaggacatttggcaatgcctgaagacatttttgggtgccacaactggggagggggtgctactggcatctaatgggtagaggccagaaatgctgctaaacattctgtggagcatgggacaacccataagacaacagaacaaggaattatccaaccccgaatgttaacagtactgaggctgaggaatcctaggtagctggagcaggcagtgaggcactgctgtgatgttcccaccctcaactgcagggtcttggaaaagaatgcatcagtccaggcatggtggtaatcccagcactttgggaggctgaggcaggaggatcgcttgagccctggagttcaagaccagcttaggcaacatagggagacccccatctctacaaaaatttaaaaattagccaggtgtggtggtgcctgcctgtgatcccagctacttaagaggctgagatgggaggatcgcctgggcctaggaggtctaggctgcagtgagccgtgatcacgtgatcacaccactgcactccagcctgggcaacagagggagaccctgtctcaaaaaaaaaaaaaaaagagaatgcatcaaacgcagctgacctcaggctctctctttttagggtcttaaaggaacaatggattcgagctaagtatgagagacgggaatttatggctgatggggaaaccatctcgctcccaggtaaagttatttccatcaccttttgaaatctatgttttaatgagctctagaaaaaccaagtgcctaaatattaggagcaagatccatccaagagatgcctgctgttctcactgtggccgcagaggccaaggtgtgggttcttctgactttgaaataacaacacatcagctggtggggctttatgctctgagcagcagagaagctcagagcttctctggtctttgtctcaggtctttgcagggtcacaagtgtgtacagactcttttttttttttttttttttgagacagggtcttactctgttgtccagcctggagtgcagtggcactatcacagctcactgcagcttcaatctcccgggctcacatgatcctcccacctcagcctcccaactagctgggactacaggcacatgccaccatacctggctaattttagtggcttttatttttttatttttattttttgtagagatggggtttcaccatgttgcccaggctggtcttgaactcctgaactcaagtgatcctttcgctttggcctcccaaagtgctgagattacaggcatgagccactgtgcccagccagactctttttctttttcttcttcttcttttttttttttttgagacagagtcttgctcttgttgcccagggtggagtgcagtagcatgatctcagctcagtgcagcctctgcctcctgggttccagcgattctcctgcctcagcctcctgagtagctgggattacagcatcatgcttggctaatttttgtatttttagtaaagacggggttttaccatgttggccaggctggtctcgaactcctgacctcatgatctgcccaccttagcctcccaaagttctgggactacaggcatgagccaccgcgcccagcatcaaacacttaatgtaaattgcagaaagactcctccactggacagaccaattaggaaaagatatccctgctcctggtgagctttattcctggtgcagctcaagacttggtgaggaggatgggcttaaattcagcctccctttcgaccattgtgcagggtacaacctcttctgtggccctggacctgtggcagtttcacccccacggtcctgagtccaagctgactctgacccagacagtaaagtataaaaaatcattcttagagggccagaggcagtgctcagctatcctggctaccaggaccacaaattattctatttatttatgtatttatttattgagtcagggtctcactctgttacccaggctggagtgcaatggcgtgaactcggctcactgcaacttccacatcccaggttcaagtgattctcatgcctcagtctcccgagtagctgggattacaggcatgcacaaccacacctggctaatgtttatatttttaggagagtcagggttttgccatgttggccaggctgatctcaaactcctgacttcaagtgatctgtctgccttggcttcccaaggtgtcaagattacaggtgtgagccattgcacccagcccataaattattcttcaaaccagcagatgcccggagggagtctcactgtgtcacccaggctggagtgcagtggcacaatctcggctcgctgcaacctccccctcccgggttcaagtgattctcctgtctcagcctcctgagtagctgggattacaggcacgcgccaccatgcccagctaatttttgtatttttagtagagacggggtttcaccatgttggtcaggctggtcttgaactcccgaccttgtgatctgcccgcctcggcctcccaaagtgctgggattacaggcgtgagccactgcgccctgccttacttctaaagtttcattaggttgatgtcagcatgaagttgggcaggaccatatgtatttagtatgtatttaagtgtctttcagaatcagtccagtttctcaggactttgccttcttaagggtcttcttatgagacagcctgatacacagaaagtcaaggaagaaaggttttaggcagtgggaagtgcccctgaagtgaaaagacatcacaaagttggccacagatgggatccttgtgttctgcagctgaaatagggaagtctgagtggagatactttggcagcagatggaaggcttattccacccttgagaacctcagaggttcctgagctgcttgtgatcttaaggtcacgtgtgttcacgctttgtcatccttgctgcttaaggtaaccgagaaggattcctgtggaagcgaggaagggacaactcacagtttctgagaaggaagtttgtacttctggcaagagaaggcctcctgaagtacttcacaaaggaacaggtaagatgccagaccaatgagagcaggtcccttcctgagcactctcacccgactaaggtctacattctaatcagtggtgcccttttcttgtagataatctcagcccctgagagttaggcacaacatttggctacttttccttggctatacagtaaatccagtccaccaaaaatcatactttctgtccacctagaatcagcttagataggtccatgtttaagcctttgatgaccacttggttttgcttcatttattcattcacttaagaaacatttattgagtacctactgtgtgctagacattattccaggcactgaggatacagcagggaactaaacaaaactcttgttctcagggagctttcagtctagtgaaaggaaagagctccgtaatcaaaacatcaatatataatataccaggaggcaatagttttataaagtaaaatagaagtggctgcgcacagtagctcacacctataatcccagcactttagtaagagattgaggcagggggattgcttgagttcagaagtttgagatcagcctgggcaacatggtgaagccccatctctacaaaaaatacaaaaattagctgggtcaagcacatacacctttgtatggtggcacatgcctgtagtcccagctactagggagtctgaggtgggagaactgcttgagcatgggaggtcgaggctgcattgagccgagattgtgccactgtactctagcatgggtgacagagtgagaccctgtctcaaaaaacaaaacaaaacaaaaacaaaaacaaaaaccgggcatggtggctcatgcctgtaatcccagcactttgggaggccaaggcaggtggatcacttgaggtcgggagtttgagaccagcctgaccaacatggagaaaccccatctctactaaaaaaatataaaattagctgggcgtggtggtgcatgcctgtaatcccagctactcgggagactgaggcaggagtatcacttgaacctgggaggtggaggttgtggtgagctgagatcgtgccattgcactccagcctgggcaacaagagtgaaactccgtctcaagaaaaaaagaagtaaaatagcggagagtgagaagatagacaacaatgagagtgtgttagggagtcagggagtgctgctgcagagtgatcagggaaggcctctctggtgacatttgagcagataactgaacaaatgtgagcactgagttacatggctatgtggggggaagaatagaagaaaggggaggaacagtatgtgcagaagccctgagcacaggtatggtcaaacacatacacctttgtaccgatttgagaaagatgatccctttaagagggtgcagcccctgggccccagtctcgaaaatcagaagcctggtttgcagttaccagtcagctaggagctttttatgcagtgcacaaacgacttaaccataagctgcaaccctggccctgagctagaagtgtgtttggtgggtgtagggcatcaaggagggcagagcgacttgtgcagagtgagcaaggaaaagtgtggagggagatgaagtcacatggtggagggccttgtaggtcatagcaagacttgggatttcttttggtaacagtttattgagatacaattcacataccatataattcacccattaaaagtatgcagtcaattggcttttagtgtattcacagagtagcacaactatcaccacaattcagttaaaaactttaaacaccttatcccttagctgtaatcccccaccccaccccaccactagccctaggcaaccaacaacttactttctgtctctatggatttgcctaatctggttatttttattttattttactattttatcttatttatttttttagagacagagtcttcctctgttggccaggctggagtgcagtggtgcaatcatagctcactgcaaccttaaattactggcctcaagcactcctcctgctccggtctctcaaagcactgggattgcagatgcataccactccacccagctaatttttatttacttatttatttttgtagagatagggttttgctttgttgtctacgctgttctcaaactcctggcttcaagcaatcctctgcctcagcctcccaaagtactaggattatagatgtgagccactacgccaggcccatatctgtcttttttataatagccgtcttcatgggtatgaagtcgtatctcattgtggttttgattggcgtttcccacatggcaaatgatgttgagcatctttttaatgtgcttattggccatttgtatatcttatttgtagaaatgtctattcagatcctttccccatattggccgggcgcggtggctcacgcctgtaatcccagcactttgggaggccgaggtgggcagatcaggagttcaggagatggagaccatcttggctaacacagatactttccccatattttaattaggttatttgtctttttattattaagttgtaatagttctgtatatattctagatacaagtcacttatacatgtaggatttgcaaaaatttgagcttttggattttactgagtgagatgggaagaaattggaggattttgagctgagaagtgatattatttgacttaagtttttgattgattgattgatttgagatggaggctcactctgtcacctaggctggagtgcagtggcgtgatctcggctcactgcaacctctgcctcccaggttcaagcaattctttgcctcagtctctcgagtagctgggattacaggcgcgcaccaccatgcctggctagtttttgtatttttagtagacagggttccaccatcttggccaggctggtcttgaatttccgacctcgtgatccacccacctcaccctcccaaagtgctgggattacaggcgtgagccaccgcgcccggcctatttatttattttttgagatgggatttcactctattgctcaggttgaagtgcaatggtgtgatctcggctcactgcaacctccacctcccgggttcaagtgattcccctgcctcagcctccccagtagctgggactacaggcgtgcaccaccacacccggctaatttttgtatttttagtagagacagggtttcaccatgttgaccaggctgatttagaactcctaacctcatgtgatctgcccacctcagcctcccaaaatgctgggattataggcatgagccactgcgcccagcctgacttaagcttttaaaaagcagcacgctggctgctgctagggtgagtagggaggaaggaggccagagcagaggcagagaaattagtcaggaagctgttgcaataacccaagtgaagaagaatggtggatccgaccaggatggttagaagtggtcagattctggatatattttggaagtagaggcaatagaatttattgaaggattggatgtggggtgtgagagtaagaggaatcaaggatgattcccagatttttgctctataaaactacaagaatagatttgctatttactaaggtggcaaagacttagacccctaaggggatgctcaaaagtcctttttattttgagatgcctatgagtcatccagtagagacatggggaaagaagttggatgtatgtttcctgaattctaaacccaagtggcagaagttggatgtctgatttggaggcttggagagagtttggaactggagtcgtcagcatgtagactggtttagtaatgggactggctaggatcacctaagcaggaaaaaggtgttcaaggactgagtattttggttatgtgttgctgagtaacaaaccatcctaaaacttaatggcttaaaatatcaatttactatttctcacaatcctatgggtcaggaatttgaggaggcctcggctgttctggtgtactccatgtggcatcagctgggctactctgctgcccttagctggccagagacccaaagaagctttcactcatgtctggtgccttggtgtactctatatgggggctctgtctttctcattcaggagtctagcttaagctttcttgtggcttggctgctgacttccctaaacaaaagcaaatgctaccagacctctggaaggctaaccaggagctgcattctgttggtcaaagcaagtcatgcaacaagccctgattcaaggggaggggaaatagattcaacctcttcatggatagagggtcacgtatacactgggagggaaagactgggtgagcgccatctttggagaccatctaccccattgagccctggggcattccagtatttaaaggacagaaagataagaagttttcagcaaagagaatgtgaaattgtggccaacaaagtaagagaaggataagctctgagcactttagccttcaccttactctatttcctatatgtagaattattatatattccccctgttgcttttctaggcagaccagagcaatgctaaaaggtctgtctatggggaggagaagggaggatgaagagaagtgggttaaagggtacaaacattgtaagatgcaaggaataaattcaatatttgataccagagtggggtaactatgcttaacaaaaatactctggtgaccaacaccctaaatatcctggcttgatcactacacattatatacatgtagcgaaatttcacatgtaccccataaatttgtataaataataatataaaaggtctgtccaatgtggccacagtctgggaccaagtaaaaagtgttaagggatgaagaatctttaccctccaagttagaggaagaattttttcccagtcttcaatgtaaagcactgaaaaatgtggctttttcaacatttttgctgaaatggtacaaaaggccggaagagaaagcgctactgcagttaggaaaggtcaccaaaccccagcagctgctgcgagttggtctctcggacagggcctcatcattggttgaaaaaagttgatctgtttttcagtcctacgccagttcagtctagaatagtccaaaaatagaatgggctccctatgttcttttttatttatttcccaaagtggatattttaaaatcataaaggtaactaatttttaggtaaaacttttgggtaatacaaaaaaggaaatgaagtataaagaaagtgaaactgaaaaaaaaaaaaaaaagccccaagctctatacaaagcacttcaaaaagttcttggaggccaggctcggaggctcacacctgaaatcccagcactttgggaggccgaggcaggcagatcacgaggtcaggagattgagaccatcttggctaacacggtgaaatcccgtctctactaaaaatacaaaaacttagctgggcgtggtggcaggcgcctgtagtcgcagatactcaggaggctgaggcaggagaatggcccgaacctgggaggcggagcttgcagtgagccgagatggcgccactgcactccagcctgggcgaaagagcaaaattccatttccaaaaaaaaaaaaaaaaaaggtattggacaaatgagattaaaattaaagatataaactttatttctcaacataagctccatcaaggtcaagacacttttataagtgatgacaccagccatttagtccatcccctagcaattgagggtcctgggaatttaaccatgccaatgcagtcttttttacattttgtttttttatgctgttttctgagacagggtcttgctctttcaccaaggctggagtacagtggtgcaattctagctcactgcagccacaacctcccaggctcaagcgctccttccacctcagcctcccgagtagctgagacttcaggcacacaccaccatgcctggctaatttttgtattttttggcaacgacaggatttcatcatgttgcccaggttggtcttgaactcctgaactcaaccgatctaccagcctcagtctcccaaagtgctaggataacagacataagtcaccacgcctggcctttttttttacactattaactgaagaaagatgggtaccctttacagattttttttttttcgagatggagtctcgcttcatcgcccaggctggagtacagtggcacgatctcggctcactgcaaccttcgcctcccaggttcaagtgattgtcctgcctcagcctccccaggagctgggattacaggcgttggccaccatgctgggctaatttttgtatttttagtagagacggggtttcaccatgttggccaggctggtctcgaactcctgacctcaagtgattcgcccgccttggtctctgaaagtgctgggattacaggcgtgagccaccatgcccggcctcctttacagattttttaagattagaaaacaaaaagaagttagaaggagccgaatttggactgtaagatgatgcataatcacttcccattgaaactctcacaaaattgcccttgtttgatgagagaaatgtagttgaagcattgtcctgggggagaaggactctctggtgaagttttctcagatgtttttctgctgaagctttggctaactttctcaaaacactctcataatgagcagatgttattgttctttggccctctagaaagtcaacaagcaaaataccttgagcatctcccagaaaactttaccatggcctttgttcttgactggtctgcttttgctatgacaggaccacttcaacctctcggtagccattgctttgattatgctttgtcttcaggatcatactggtaaagccatgtttcatctcctgttacagttcttcaaagaactgcctcaggatcttgatctcacttgtttaaaatttccattgaaagctctgctcttgtctgcaactgatctgggtgcaatggcattggtacccattgagtggaaagtttgcccagctttaatttttcagtcagatttgtgtgagctgcaccaattgaggtatctgtggtgttagctattgtttgtgctgttaattattgcttctcttcaattagggcatgaacaagatgatttttttcattgtaaattgatgtagatggtctgctgctgcaggcgccatcttcaacatcatcttgtccctccttaacaagttatccatttgtaaactgctaattttgttggggatttgtccccgtaaacttttctgaaagcaccagtgatttcaccattcttccatccaagcttcaccataaatgttgatgtttgttcttgcttcaattttagcagaattcatgttgctctgagaggggctgttttcaagttgatgtcgtatccttcttagtgcctcaaacaaaatcccactcagacatgttataacaagttagtatgagtttattttggtgcaaaacaatttgaaatccatgcatagctttttcatactatgtgttttccatgaacttttctaagtcaccttgtataagagtattatatgatctcatttatatgaaattttagaacaggcaaaactgtactgatagaagacaaataagtggttatctggtgttggaatggggtagagattctgcgaagggggatgagtgaagtcttttggggtgacatttaggatgataagtaatgttttatatcttgattgttgtggttacatgggtatatacatttgtcaaaaatcaaactattttttttttttcgagatggagtcttgctctgtcaccaggctggagtgcagtggtgcgatcttggctcactgcagcctccgcctcctggggtcaagcgattctccttcctcaccctcactagtagctgggactacaggtgtgtaccaccactcccagctaatttttgtatttttagtagagacaggatttcaccatgttggccaggatggtctcgatctctcaacctcgtgatccacctgcctcggcctcccaaagtgctgggataacaggtgtgagccacagtgcccggcccaaacttaatacgggtacactttattgtttctaaactacacctcaataaatgttgattaagtgaaaattaacaatgagatacaattccatacccatcatattggcaaaaattttgtaatctggtagtgtcaagtgttggtgagtatatggggaaaggggaactattctatttcattgatggaagtaaatattggtacaatcactgttgagccattcagcagaataatttggcagtctctagtaagtgaagatgtatataactgtgatccagcaattccatttctaagcatacgctgtgacctacagatgcactcacatatgtgtaccagatgcacaaactgactgcaacattacttatgatagcaaaaaatcaggaacaatctcaatatatatatcggaacaatctattaacagaaaatagattgataacttttggtatagtcatttacaagagcaaactagactggtgtatctcagcatgggtagacctcaaaaatataatgttgaaagcaaaaagaacctcattaaaatgggcaaaagatgtgtacagacacttctcaaagaagacatacacgtggccaacaagcaaatgaaaaaatgctcaacatcactaatcagagaaatgtaagtcaaaaccacaatgagataccatctataccagtcagaatgactgttatcaaaaagtaaaaaagtaacagatactggtgaggttgtggagaaaagggaatgtttacacacttgtggcaggaatgtaaattagttcagccacggtagaaagcagtttggagatttctcaaagaacttaaaacagaactaacatttgacccagcaatcccattactgggtatatacccaaagcaatagaaataattctactataggccggatgcagtggctcacgcctgtaatcccagcactttggaaggcagaggccggcggatcacctgaggtcgggagttcgagatcagcctgaccaacatggagaaaccctgtctctactaaaaatacaaaattagccaggcgtggtggcgtatccctgtaatcccagcaacttgggaggctgaggcagaagaatcgcttgaacccaggaggtggaggttgcagtgagctgagatcactccattgtactccagcctgggcaacaagagtgaaactcagtctgaaaaaaaaaaaggaaagaaagaaaagaaaaaagaaagaattctactgtaaagacacatgtacatgtattttcatcgcagcactatttacaatagcaaaaacatggaatcggcccagatgcccatcaatggtggactggataatggaaatgtggtacataaacatcatagaatactacacagccataaaaaagaatgagattggctgggcacagtggctcatgcttgtaatcccagaactttgggaggccgaggcaggtggatcacgaggtcaggagttcaagaacagcctgaccaacatggtcaaaccccatctctactaaaaatacaaaaattagccaggcatggcggcacgtgtctgtaatcccagctactcaggaggctgaggcaggagaatggttagaatctgggaggcagaggttgcagtgacctcagatcacgccattgcacttcagcctggacaacagagcaagactctatctcaaaaataaataaataaataaataaataaataaataaataaataagaaccagattggccgggggcggtggctcatgcctgtaatcccagcactttgggaggccgaggcgggcagatcacctgaggtcaggagtttgagaccagcccggctaacatggtgaaaccccgtttctactaaaaatacaaaaaattagctgggtgtggtggcacacgtctgtaatcccagctactcgagaggctgaggcaggagaatcgcttgaacctgggaggcggagtttgcagtgagccgagatcacgccgttgcactccagctgggcagcaagagcaaaacaaaacaaaaataaaaacaaagaaaagaatgagatcatgttctctcagcaacgtggattgatctggagaacattatcttaagtaactaacaaaggaacagaaaaccaaatgttctaacttataaatggaagctaaacattgagtacacatggacacaaagaagggaacgataggctgggctcagtggctcatgcctataatcccagcactttggtaggccaaggcaggtggatcacctgaggtcaggagttcatgagcagcctggccaacatagcgaaactctgtctctacttaaaaatacaaaaattagccaggtgtggtggctagagtgcagtggcacgatctcagctcactgcaacctccacctcccaggttcaaaccactctcctgcctcagtcttccgagttgttgggattacaggtgtctaccaccacgcccagctaatttttgtatttttagtagagacggggttttaccaagttggccaggctggtttcaaactcctgaccataggtgatccacccacctcagcctcccaaagtgctgggattacaggcgtaagccactgcgtccggccagtatctgaatttcgatatgagagcaagaacatttaaaacccatatatttacagattgatgcttgtttgcatgaaggccttggtgaaggttgaccagaagtcaccctgtggactgtcagcgtctttctttctctttctctctttcagggtaaaagccccaaagctgtcatcagcattaaggacttgaatgccaccttccagacagagaagatagggcacccccatgggctgcagatcacctacaggagagatggccacaccaggaacctgtttgtgtatcatgaaagtgggaaggtgagatgcctggagttgccacctccgcctccagctcgcaccccaggacttggcaggtgcagctcaccacctcccctgctcactggtgctgtgctcagctgcctcttgagattttctgctaccatttgccttaatctatcattgcctcccagtctgagataaagatatgaggagggcagggtgagatcagggagaggaacctggcaagtaccatggctatatctggacagtgcacagccaccaatgaaagtccagttacagaagggactatgcccagggatgcaaagccaggtagggccagaggttctgaatacgggggaggaactgatggacagtcaggcagcagtgcaccccgggaccctgcttctcaacatgtggtcctggcccaacagcattggcatcacccaggagctcaaggctgagcatggtagctcctgcctgtaatcccagaactttgggaagccaaggcaggtggatcacttgaacccaggagttcgagaccagcctggtagcatagtaagacccccatctttacccaaaaatacctccaaaattagctaagcatggtggcatgcacctgtagtcccaactacttgggaggctgaggtgagaggatcgcttgagcctgggaggtcgaggctgcagtgagccatgatcatgccactgcactccaagcctgggtgacagagcaggaccctgtctcaaaaaacaaaacaaaacaaaacaaaccagaaagaaagaaagaaaaatagagtctgaggcccaccctggagctaccaaattagaaactgcattaaaaaaaaaaaaaaaaaagaagaggccgggcgcggtggctcacgcctgtaatcccagcactttgggaggccgaggcaggcggatcacgaggtcaggagatcgagaccatgctgtctaacacggtgaaaccccgtctctactaaaaatacaaaaaaaattggccgggcatggtggcaggtgcctgtagtcccagctactcaggaggcggaggcaggagaatggcgtgaacccaggaggcagagcttgcagtgagccgagatggcgccactgcactccagcctgggtgacagagtaagactccacctcaaaaaaacaaaaaaaacaaaaaaactgcattgtaacgggatcccaggtgagtcttgtgcacattaaagtttgagaagcactattttttttcctttggagatggaatcttgctctattgcccagactggagtgcagtggcgtgatctcggctcactgcaacctccaccttcagggttcaagcgatcctcttgcctcagcctcccgagtggctgagatcacacccagctaatttttttgtatttttagtagacacagagtttcactatgttggccaggctggtcttgaattcctgacctcaagtgatctgcccaccttggcctcccaaagtgctgggattacaggggtgagctactgcgcccggctgagaagcactatttaatagtccaggaaatctgcccagtcagagatgaataagccaatataacagaataagctgggtcaggtcctgagcagggtcacataactaggcaggggacagagatgctgagtgggggtggatgaaggtgggtgctgacattttgtgaccatctattaactcccctgggcactgcttttggtgattgctgtccatcatttcttaatcctgaaaacaagccccacattattgagtcacggacatgttagtaacttgctcagggtcacagccctgcacccactttacctgccatgtgcctctgctgtaggaaggacacttggcagcaggagccaggaaccagatgcagggactagaccttcctaaggggcccctagcaccatggccctagccccctctccatgccaatcactgccataaggacttttactgaggcacccaaggtctctggcacttaggatacccagctccctcctatctgcccagtatggtgcatctgacaacctgggtctggccattcttctcttttgcttgatgccccagcctgtctgttagatgggcataaatgagggctccagattcctgcctgcaggagtcagggggtgatttaaaagctaaatggacaggcataagggatggggagggggctgtggcaaacaggaaaacctgcatggaggattgaaacaaacaaaactttaggagcaaacagacatgtatgcaggttggatttggcaccaggatcaccagattatgactggagagaccttccaaggtgaaggcctaggtgtgtcttttctggactggccccattcccttagtgtctgagacctaaggtttttttttgagacagagtctcgctctgtcacccagactggagtgcagtggtgcaatctcggctcactgcaacctccacctcccaggttaaagcaattctccagcctcagcctcttgagtagctgagattacaggcatgtaccaccatacccggctaattttgtatttttagtagagatggggtttcaccatgttggtcaggctggtctcaaattcctgacctcaggtgatccacccgcctcggcctcccagagtgttgggattacaggcgtgagccactgcacctggccagagggtccttaatgaaccccaggacaagagagcacagatccctggaatactaggcctgtgtgcttcgcctatgagagagaaagagaaatggtttcattccttttaaaccatattcagatgactttctcaatcaccacattatatcaaagtcacaaactaccactatttgaacaagcctttagcctcccaattccaaattcctgggagaaggaatctgataagcccagtccagcctctgtgttgctccaggcctggtccagttgctgtggttaagcaggggcaggatcacagcagtaaatggggctgcaactggggttgggtgaagataggcggggtagttctcacagaagcagggcttgggctgagcaagcaccaaaaatctatctattacaacatcaaaactaacctgcgggataagtggaatgttttgcgtaaaaggtgtgtgtgggatggagcgggctaagcagaatgtcccgagaggaaggaacagtaggtgttgggagaattgcaaatagttttgcatggaaggagctcagacagcaaaatcatagtaaagaacttaagacttttttttctgagggtagtagacaggactccaagccagactgattagatttgtaattagaaaatcactctggctacaggctgggcgctgtggctcacgcctgtaatcccagcactttgggaggccgaggcgggcagatcacgagaccatcctggctaacgtggtgaaaccctgtcactactaaaaatacaaaaaaaaaaaaaaattagccgtgtggtggtgggcgcctgtagtcccagctactcgggaggctgaggcaggagaatggtgtgaacccagaaggcggaggttgcagtgagccaagatcgcaccactgcacactctagcctcggcgacagcatgagactccatctaaaaaaaaataaataaaggaaaatcactcaggctgccatgagagggccagtcagagagcagctgatcaaggccagctagatacatggttgtctatgtgggagatgaaggtggcccaggctgctgagggacatgttctctcagagtgacagcagaaggggccaagccagctttggcctaagttgccatgagcatcctcattagaggagcatccccaggcataactgctccccacccaaatgccaatctttgacatctgaggacaatgatttcctagagccttgctccttagagtgcattccactgactagcagcatcatatcacctgagagcgtgttaggaatgcagagtcttgggccccattccaaacctactggatatgcctctgcattttaacaagagcctcaggtgattttgcacgcattagaaggtgaaaagcactgtccgaggccattgcagaactcccatgcagttcactcaatccttttccagggctctggggttatccctgtcagaggcttcctgcttgcccgggttagcccacgaggctctgacacaatcctccctggatgcccctgagccgagctgtggggtgtgtgcaggtgctgaatatatgtgccccacacccaatgcccagctagcttcccgccaccagaggtagcttcccacccaccccatctcactgctgtgtgtgtgtcctgtgcacttctctccgcaggagatagtggactggttcaatgccctccgtgcagcccgtctgcagtacctaaaaatggcctttcctgaactcccagagtctgaggtgagctaaatgcggaccccaatttctgaatctcctcttggccatctccttctttccctgtctgttgacctcgaagacactcagaagccagactagggctgggcgcggtggctcacgcctgtaatcccagcactttgggaggctgaggcgggcggatcacaaggtcaggagatcgagaccatcctggctagcacggtgaaaccccgtctctactaaaaatacaaaaaaattagccaggtgtggtggcaggcgcctgtagtcccagctacttgggaggctgaggcaggagaatggtgttaacccgggaggcggagcttgcagtgagcccagatggcgccgctgcactccagcctgggtgacagagtgagactccgtctcaaaaaaaaaaaaaaaaaaaaagaagaagaagccagactagttttgtttgcaggcaagacctcgaggttgagggctgggctgctcagagggaagcccaaggcattctccaggggagcctgcgggggttacagcctcacatacgacaaggcggcctcccaaaagctggtcagtgtctccccttcagaagagtgtcaaggggctcagcaattggtcatctctttctgaacccttctccctctaaaatgtacaaatgatccctaacatactgcttacagagtgctttgagcccattttgtcttgtgaaatggcagccaggcaggggtgattatttccatttcactgatgagttatacagtcccaggaagggcaggtgaataaccaaaggtgtgcttccctttctaaaatcccctctttgccctgtgatgctctgggcttgggaaagcctgggatcctctccattacagttgtaacaggagcaggtatgcccttcatggccaacatcatggggagccgagaacttcattttgattgtctccagacttctggggccttcatctccctatctcaggctgggccagggagacccgcatggtgtagggcagaggatgctgtctcgagccaggaagcctgggctctcagggatgctctattgctcacttgctgtgtgacccctgcaggtcctggcacccctctgagcttctatttccatatgggtaagatggcggttagtccaggtcatcttcagggtcccttccgcctctgagattctatgctctggtcctcttcaagaggctcccctccaagaggattttataagtgatggggctggaaaaccattttaatgctgggattttcttaatctcaaccattagagtttccttgaaagcctaaatgctccttaattccaaggtttgtagggagccagttgtctggaatagggtcccctccaggcccagggatgtgctgagatggcagctctctgggagcaattccagcaaggcccgagtcagagcccttgagtcagtctgctgagtttgcacccagaactggttaatgctggctcccatgggcggggagtggagactgctgactgctgactatgaggagggaggacaaagtgcagatgctcagccttatttaatctgggcaagctgcccatctttgctgacatgtgtaaaggaaattgctctttggtcaacatcctcaatgttcccctgcctctctcatccactgtcggtacctgatatccatcccgtgtctttcctcccatttaatgtctgtgtatggtgtgaggttctgagcaatcaccaggcctggctcaagctttaggggtccacatgttggaaacccagggcatcccagtggggtctgtggtcctgtaataaatgcatatggtctcttggacttcagagaaagtaggttttgtcgccatggtgacagatgagtgcatcgaggctcagagaggtgaggtgacttgcctaggtgatagtacctactttctagggctattgtgagactccagcgagccaaggcatcagaagtacaggaagcagtgctccagccatgtgactttcctttttttcccaatggtttccctaggcctctgcttgctctgtgctggctcaaattccgaatattgagcagttcgggactccatctgttttctccaaatggaacaattaaagcctagtgaatgtattttaagagaaggggagtagtacagtttatatcttgtttcttacattaaaaatttttttttaattttttatagagatgatgtctcacttatgttgcccaggctggtctcgaacttctggcctcaagcaatcctcctacctcggcctcccaaagtgctgggattacaggtgtgagccactgcatctgaccaatattttcttttcttttctttttttttttttttttttgagacagagtctcgctctttcgcccaggccagagtgcagtggcgccatcttggctcactgcaagctccgcctcccaggttcacgccattctcctgcctcagcctcccgagtagctgggactacaggcgctcgccactgcacccggctacttttttgtatttttagtggagacggggtttcaccgtgttagccaggatggtctcgatctcctgacctcgtgatccacacgcctcggcctcccaaagtgctgggattacaggcgtgagccactgcgcctggcctaatattttcatttttggctcacaaatttcccccttttaaacttcccatagctgttccccagacctcacttcccctgtgcctctgccctgggccctggagctctggagaagcctctctgttctttgaagcctggactgtcatttgaagctctagactttccaggttgatgcctaggagcataggaggccatcatcaacccctggaaacatctctgggcgtaggctgccaggctggaagggatgctggggatcacatgatccaggctgtttatcacacaggggagacataaggcctcgagagacagaaggtcttaacaaaggtaatgcagctgatggaggccagaactggaattagaaccaggtctcccgacttctgcttcagaactttctctgtccactctggcatcattttcttttcttttttgttttgttttgttttgagatggagtctccctctgtcacccagactggagtgcagtggcactatctcagctcactgcaacctctgcctcccaagttcaagggattctcttgcctcagcctcctgagtagctgggattacaagcgcgtgccaccatgcccagctaatttttatatttttggtaaaggtggggtttcgccatgttggccaggctagtctcaaactcctggcctcaagtgatctgcctgccttgacctcccaaagtgctgggattacaggtgtgagccactgcacccagcctctggccattattttcttgttgcttggtgtcagaatcctgaccaggcctttcccaaggtcctgctcagagggccctggcatatttatactttagcacctagtgtagtggtaggagtacagtctagtgtcattggccctgggcctgaatctcagctctttgtgctaccagtgatgtgactttgggaaaatccccagccccttctctgtggcctggtttcttcagatgtgtaatgaggctggtgatacccacctcgcagggtgattgagaattgcacctggagcctgatgcaaagtggaccctcagaacatgttgcctgacaccaagagggtctctgcagagccttgcctatgtccacaccctggggttactgaaggaatccttaaaccaaaactcggccgtgccactaagctctgcaaacatctggggtgctgtcgactggctttgttgaaatattaatattatgaccattgcactttccaaatataatactgtgagccatgagcgtacatccttccccatttcaaacttcccctttgtcgggagccaagctcggcgggaacctggagccttggggtgtgagttgggggtcagtgtctgtctctcttccccagctcgtgccattcctcaccaggaactacctcaaacaaggcttcatggaaaagactgggccaaaggtaccttctatcactccctggggaacttaatatggtttaatgtatatagaaggtttcatgtgtttatgggatgattgttaagaggacagtgaaaggtgttaggccaagcttgtccaacccacagcccatgggccacatgcaacccaggacggcttggaatgatgcccaacagaaattcataaactttcttttttaaatttttttgagacagagtcttgctctgtcacccaggccagagtacagtggtgtgatctcggctcactgcaacctccgcctcccagattcaagcgattctcctgcctcagactcctgagtagctgggattacaggtgcccaccaccatgcccggctaatttttgtaattttagtagagatggggtttcaccatgttggccaggctggtctcgaactcctgacctcaagcgatctgcccacctcagcctcccaaagtgctgggattacaggcatgagccaccatgcccagccaaattcgtgaactttcttaaaacattatgagatatttttgcgatttttttttt

SEQ ID NO: 1964 - DNA, 91 bp, Homo sapiens
ggagaatcgcttgaacccggcaggcggaggttgcagtgaaccaagattgcgccactgcactccagcctggcgacagagtgagactccgtct

SEQ ID NO: 1965 - DNA, 26197 bp, Homo sapiens
ccccatttctttaaggaaaacaataaaaaaaccaatggcagcactggtcttgactatgagaattataacccaaattgcaaggggaggaactgtccctgaaatcctgtttagaaagccataaacaaggaaacacctgtttgtatacagtttgaagggtggtatagctagactggcaatagattcttgtgaacaagttagtagggcaatagttttgtttctttaaaggattaacatttaggtaataatgcgtacgtgaatgtttgcctagaagtcctgttccctatataataatactttgataatcatttcaaatgccaacccttccttaatataaaagttttgcgttatgttaaataaactatttttttctttattcttttcttttagctttatcttcaagccaggatgaagggagactgggcaagactcttacgccccacactgcaatttggtcttgttgccgtatccatttatgtgggcctttctcgagtttctgattataaacaccactggagcgatgtgttgactggactcattcagggagctctggttgcaatattagttgtaagtatacaggtcaacagcctacatcttgatattgctaaacatttatataagtaaatagaaaaaaaaaatccaaaaaatccccagctgaggagaagactatgcagtgggcaagaatctcaatgttattaaaagtcacttcaggatacacaccaggttaaaaactaggttgctctttctaaaacttagtagttttgtaaaatcttagtatttttattgtgaaaggctctggctagaaatagtttttttaggggattatgacttgaaaaaactaattcacatgtagaaataactcttttattcagtattggcaaaatgaagctatttgctgaaggcataacaaagcaactcttaatttggaataatctttaaaaaatcccagttagtctctaattttttatatgcttaatctgtacacctcaaagtatatccttttgtttatatttatcttaggatgctgttgatcacaactttgtatgtagtttttaacttgatctaaattataccattaaatattttgcactgtaggctgtatatgtatcggatttcttcaaagaaagaacttcttttaaagaaagaaaagaggaggactctcatacaactctgcatgaaacaccaacaactgggaatcactatccgagcaatcaccagccttgaaaggcagcagggtgcccaggtgaagctggcctgttttctaaaggaaaatgattgccacaaggcaagaggatgcatctttcttcctggtgtacaagcctttaaagacttctgctgctgctatgcctcttggatgcacactttgtgtgtacatagttacctttaactcagtggttatctaatagctctaaactcattaaaaaaactccaagccttccaccaaaacagtgccccacctgtatacatttttattaaaaaaatgtaatgcttatgtataaacatgtatgtaatatgctttctatgaatgatgtttgatttaaatataatacatattaaaatgtatgggagaaccaaatccacacttgcaggcatttgtagtcaactgtaatcaaacaggtggtcaataatttaaaatctcacattcctttagctgactctacaagtagaggctggcagcaaacacaatatctctcttgattttggtgattcctaagagaaaagaaagtaaggtttaaactttcaagaccacaaaacacctaacttgcctctaccgaaattttaaagccagtataccaaccctgattcaactggtaagcgagcagcctagaaagtcaaacaccttgctgaacacctagaggaatttgcagccacctctgtgaggtggaaaacatacaagccagacccctgttcttttgactctgaaatactccatgggggctggccaggaaagaggtgtctagaactgtttaaaaagataaatgctaggtcgggcgcagtagctcatgcctgtaatcccagcactctgggaggccaaggcgagcggatcacctgaggtcaggagttcaagagcagcccgaccaacatggagaaaccccgtctctactagaaatacaaaatcagccgggcgtggtggcgcatgcctgtagttcagctactcaggaggctgaggcaggagaatcgcttgaacctgggaggtggatgtggaggttgcagtgagccgagattgcgccattgcactccagcctggggcaacaagagcgaaactctgtctccacacactaaataaataaataaaaataaaaataaaaaaaattatagggaaggactaaactgtctaaagaaatgtaaaatccaaagacttggattttcaacctatatcagaagacacttttttttcagttcccatgtgaaattctttctaggccaaggaaggacaaatacaaattttgattacaaattatttttaaaactttgacacctacacttaaattctgagtcattaaacaggcctacatttatcaactgtggaaatatcagccagtttttgcaaacctcttcttaggacactaagttgtttgcagaaatcactagcattgactgactcagcaacaatgtggttatattctttgattaacttagtcctttttcttggtcaagagtcagtagacaggactgaagcttatgccccttgcccccccaccaccactccattactaccaccttggtttagccatcctttcttgatctgttctccccacttctactgtgctactctacagacttgccctgaatgtaagagcaacaattaccttgtaaagtccaagttggggcaggtcactcccaaactccacacctccagtcactgcagagttgagaagcctggggctgggaactatggaatcatttcctttctcacttcaacccctactcctctactcactgcccattctgctccagccacactggcctcttgctggtgttcacgtacatcaagcatacaccaaaggccttaactgccaccttccctgtggaggccctagaccatcatatccatctgccaattctattgtcttttctgctttgtttttatcttacagacttatcaccatctgataaatttaattgttgacttattgtctatctccccacactagaatgtaaactccatgaaggcaggggtgtctttttgttcactatatcccctagtgcttaaaacaatgcctggcatgtagttagcgtacaattaatatacgtaaatgcatgtatatataaaatctcaacttttcccccaacacactaaattttatagaaacactagtagatagctctccatgacaatgcagtgaagaacatctcaaaacgtcctcctaggttgtggtccagggctcaagatttgcttcaccaaatttgtctaaattagaaacagcttatccatttgatactgaccttctgcaaatttattttccagctcagtgtttccaatggcttttgctgcttgacacatttgtcgaagcaattcttccaggcgcctcatacaacgaattatgctgcctggatagaaaaggaacaaaacactggtaaaatggaaataatcaggaacagcagaatttttgttaagaggcaaggcaggagaacacacgataattaatagtactttgagggacttcccatgaagtaaatcatggttaggtactggagaaagctacaaagatgaaaggcttaactcccacctttgactaatggtagagacacctgtttattactaacatgctgacacttggtattaagtaggaaaacaaaatgccctagaaggagggagcaactttgggtgaaggctgcaaagatgacataatctgtgtctgtaagaaccaggcagtatctctcaggcagcagcaacaagggaaggaccaccacgacaatgcagaaaagcctggcaaactgcagctattcaaggaccctgagtgtggcctagtgaggcatctggacaccatccataccatctcatagaatgcaacagactgtttttagcaggagagtaacaagataaaacttgtcattttaaaggtgcattcattcttcttgaccttagattctttcattagtacgttctttacacagtgttctcaaggagcacaaggaaagaagccttttcccatgggtctagaatctgtttgagaaaagtgtttgtatcaaagctgaagctataaacatagtttcacttttgctagacttgtgcaaagaggagcagagattgtgagatcctttctctaagtgctacctgcctaaatctaaaacgcttgacttcatttttaatatatgaaatacattaggaataccagttctcaaaatgcagtctgtaggaacaatgaactatttacactattaacaattattaaattaataataattatttgttatttctattctcagctgctaggaatgcaggctccaatactgccttgcaatgaaacaggaaatccaactgcagaaacttctgggtgtcaagagagagggtaggaattgggatagagagggtaatgtcatattacctatgcaatcagatattaaatgtttatgcaaacaagtatatccaaagataattaaattaggtagtggctcaaaatgtaactagatttttacctgagaccagattctcacaggtcatttaggattgaaatgaaatcctttacaaagtcctctgctgcacagggcattaaagagccagacacattctcaaacattgttttgactgacttcaaatgtgtaccaagaaacacaatgtgatattattatttcacaaattttagtaactcgtgttaaccagaatctgtgaaagttatcagagaccaaaccatacgaagtaaattactaagataaagaataaactaaggcaagtaaatgcacattcaggccagagagcactgtcatgtcacattttgtaaacatttcgactcaatttctggaaactttagtttcgacacagtttcaggtaacaagcaaattaggccagtaggcacaaggttgcatatacaatgactgtggttgttgcccacagagtctcatcaacaaatcactgggtatgtgcacaaacactaactgtccagagctgcctgaaacatagaggctactccccccagggattaatgaagactgacgattaagtagtgaattgtctagcatctctcctacctactacagttctctgtaatccaagggctcttcttacacccacctttataagtcatcctgcctcatcagcctgactaagtgctagacaaaagtttcaaagccatgacccatcataggctaaatgaagctgaccaaaaccgaaacaaaacaaaaccacattaacctactggtttgttacaaaattttttttttggtcctgccagagtagaaagagaaatccaattctttctagttattgtctttaaaaaatttttcaaatagtggtaaaatataaaacataaaatccacctttttaaccatgttaaagtatacaagtcagttactgcccttttttatattcaggtttactacattctggaagaactcacatggagacagaattcacacaccataaattattttaaataagtgtacaactgagtggtttttagtatattcagacttgtgtaaccatcatcattatctaattttagagcatttttaccacccccaaaaaaccttgttcccattaagcagttacatgtcttcctgtccctccagcccatggcaaccacgtctatgctttgtctctatgaatctgcttactctggacatttcatataagtgaaattatacactatgtggcctttgtgtctgccttctttcaacttaatgtgtttaaggtttgtccatattgtagcatgagtcagtatgtcttttctaactgaaagctgttccatttaatctttattacaatggaacaccttgccattaaaaatggcaaaaaccacaattactttggcaccaacctaatatataccacaatttattcatctatcgatggacacttgggactatatgcttttatttaagagcattttaataaacatcagccttacccggttgatgaacaaaacagcatcattctcattaaggagagaaagcagcagattttcccgaacagaacttctgccttcagctttctggcataccctaaagcagtttcctacagttcatgctctgacccgaatttaatactcctatccagcctggcctcaggttagaatcacacatgtatcttgcaactacttgccgctaaaccccagcttaggctgaaccctttcttgagagcagagactattgctcacactgtaactagcatggtgcctgattcccactagggtctcagaattattcattaaacgagtaagtatcaggtactaaaactgtgccaaaatgtaaagacagaaacaattactaataaattgttactctattattatcagcaagaatacttttaaaagacaaatccactggaaaaccactcatgacactgatgatgctaagaaagggttaaactgctacttgaaaggcatgtgagagaatgtgtgtggtggggagagttgaggaatgcaattcacagtatttgctttcaaaacatgtggcatacagagggagcaggactgaaaaaaaataaaaagcatatggcaggcagaggtacagtaaatagtttcaagagataattcatcatagaagctttcctaatgacacttgctcagtggaaagcaaatcctttgtcatccttcatagttaagagtacaatattgtttatgtagagtcagaaataaatagtaacagcctctggattacttgactaaaaccctaggcatcagcccatacaaatagtttgtttaaactgtcattcaaatttagtttaatggaaataaaaaacagctaaattctgtcattttttttccagggtgataacagaataaatacttagtcttcaaaatttctcaactgaatcacaatatgaacttttcttttgcattacacatcccccaaacacatggttttaatcattacagtgttaactagcctcagttaatgtttgaagaatacttaaaactacttctgaggctcaggatatgaaatgaccagacacttttattttcatatgaaaagaaaattaagaatcttattaggaacaaatatggtttgcacacagcacattagaaagttccaatgcaattattgtctgcctgtaaaaacagacacactgtactgtgtgctacagctttgattacagtatttttccaatcataaaacatgtgtaggccagctgcagtggctcatgcctgtaatctcaacaccttgggaggctgaagcaggtggatcacttgagcccaggagtttgagaccagcctaggcttcatggtaaaatcatatctctacaaaaattaacaaaaattagctgggcatggtggtacatgcttgtggtcccagctactctggaggctgaggtggaaggatcacttaagcccgggagatggagggtgcagtgagccaagatcacgccactgcactccagcctgggtgacagagccagaccctgttgcaaaaaataaaaaacaaccacatacaataacgagatgaggaaggaatggctattcttgaaatggaagcactatgtaacactgtaaaaacaaaagagagaaatactatcctaagaaaatgaaggttctcattttttgctacttaaatcaaaaaatagttttaagggcgaatacatagtatatcccaatttttagaaaggtttaagctcatctactggctcacacacaagaaaaacataaaaattatgcagatgttagatctaatttcaagttagagctaaaaaactggatttctcaaattttcaaactgaaatttcaagcaaactgtgatgtagaaatagcccctgagtaactgaaagaggacagaacagacttcaggaatgctggtatgctgtggaaaaagtcaactcataggtggcatctagtatgagctacaaaccatcttcaatttggcagtttaggatttatcttccatactgtgataacttctacttaggtagaaagaacagaaaaaataatccataaagacaattttatatgaattcctagatttaaaaaaaaatatactcatctgacaggccaggtctactgcccttgctttttacttttctttttttctttttttttttttgagatggtgtctcgctctgtcacccaggctggagtgcagtggcacaatctcagctcactgcaagctctgcctcccaggttcacgccattctcctgcctcagcctcccgagtagctgggactacaggctcctgccaccacacccagctaattttttgtattttttgtagagacggggtttcaccgtgttagccaggatggtctcgatttcctgacctcctgatccgcccgcctcggcctcccaaagtgttgggattaccggcgtaagccaccgtgcctggcctgctttttacttttctaaaaaaaataaaaaataaaaataaaaataaaaaaataaaaaaaagctactctctgccatgtaccactattgttttatgtcattgtgttctgacttttcagagaagcagatattatacaaatatgagtattgtattatcaagtcttattattaggcattgaacagttactagtttcatccttatgttccaaaaagatgtcagactgaagactggtggtgctctatgtgatcgccctagtgctgctgaaacacaattgtcatacaccaacctgtgctcctgttttaagcaattttcatcagtgagtacgcaacatccctcttctcactgactcggctaaacaccattaactaattagagatgttgctaaacatcatctaggattaagacctgtttagtattactccaagcatgacttttctgtggatggagatggtatagtctagtgtagggtttaagaaattttcaggtgatccaaaatttaaggataaggtggtatggtgcttaactgaacttacatgtagttacagagaccagagtttaaatcatcgtgccctcacatcaccttggccaaactgtttaccatagtctccttgtgcaaagtggagataatatctaccctgaattgctatttggtgattacatgtaaattatacagagctcttagcacagtgtttggcatatagtacttactgggcaatgactttcccagtaacagaatacagaattcaaaggatgctttgggactgtttgactaaatgatcatttagaggaggctgagaagtttataaaccttagaaaaaatatgtaagatacaacaccataatttaaaaatgtgctataaactttaacattaaaaaccttaaaacccataaagttcaatgtagtaaaggccctcagtttaagtttttaatattctgttgcagagaagtttaacctatgcatcataaaaataactgattcataaaatcagtaatctattacttctttaataatatcagttgaaaggcctataatatttggcatgttaaacatgtaatttttctcaaactaaacctataagcaatagtagcagttcttattataatctctatacagaacaaactcatttattttcatttttaggaaagttcaatgtaaattatctcattcagtaaatacaactggccatttataaacacacaaaccaatcttttcctactgaatgcagcattttaaaatatggtttcgtttaaacagtctacttatttttttgcttcttattattcacttattccttatatttcttttgccttaattttttcatttaaaatttctcttcagttgagtaacaattattcttcagtctcttaaaatcctgctcattaaatttaatctgattcatgctgcaataacagtctgactaaagccaagtcaattacatatgcaatgactgatcattttcagctctgctatttttagtggaattatatagctcaccaggagaacaaaagtgaaaaggaaaaatacccacataaatatgacttcttagggtcatctgcttgtgactgtagaaactcatagaattacaactgcacagaattatacagtttaaaatagtttctaaaggactttctaatgaacagactatgcttattaaataatacaaagaatttgtggagaatattttttaatctatataatagggagaagatttcatttagttaccaaatattaaaaatacatattatacttgtttaattaaaacaataccatcctaactgtatttcttatactgtaaatatatatgtgtaaaatttaaccataccttcaaagacatctgtcattttgcagatatgggcaaatgtagctccagttgcccaggtatatactacatccattaagtgaggtttaaatgagcttagataagtttcctcatcaatttccaatttggcttctgctgaaacttttgcaattcttttagcacattcctttaaagataaaagagttaaaattccttacttatgatctcccatatcactttattctttaggtttccaagccagtattccaggaggtccctttttcttcctaggtattatgtctgcaatgtggacattctgctcctaagtaggcacagtgcctgttccattgctaagtgattaaacggccaatctttcccattatgttgaggtagttaactaagaaaaatgtatcaagagcatgcttttcagccagtgataccttttcaacaaagaaacagaactcttcattaaaattattcaagagcagcatttaactaatctctaattatttcattacaaaacagatttagagaaatacaaatcctagagcaaaatacatttttccacaacaatgcttaaaaatgtacatatcttcatattgttttcctctaagttgagaaacttcattcttctttacttggcaatctaaaaggccaaaaactcctaggcctatgaagactttgctggttctagaaatttaaatttcttagtgattttaaggcatgttacatgttccactgaactggccttttaattttaatcagaattttttgaattattattttaaaaatattttaacttttattttaggctcaggggttcatgtacaggtttcttatctaggtaaacttgtgactcaggggtttggtatatagattatttagtcagctgagtactaagtataatatgccacaggttttttttttcttttttcttcctcaacctctccttcctcccactctcctccctcaagtaggcaccagtgtctgttgttctgaaggggcccttttatgacacatttttttgttcctctcttgtaattccttagctcatctttccttgtctttgtctaatgttgaacagacagaaaaaatcggcttatcctatgaaaatagtaagagagaaatttattactataaactactgtggctttgaggatccagagacaatttcttatgataaaacagattttaaaactttgttataggctgggcacagtggctcacatctgtaatcccagcactttgggaggccgaggtgggaggatcacatgagctcaggagttcgagaccagcctggccaacatggtgaaacctcgtctctactaaaaatacaaaaattagctgagtgtggtggcgggtgcctgtaatcccagctactcaggaggctgaggcaggagaatcatttgaacgtggaaggtggaggttgcagtgagcccagatcacgccactgcactccaggccttggtaagagagcgagactctgtctcaaaaacaaaacaataaaacaaccaaactttgttataaaccagaatgaaaaaatgtgcaaaaaattaaaaataaactaaatcctagtccttcaagataccattatcagtactgaggaagaaaatgacacatgcactgagctgtcaatacagcctatttacattatgaagcttttaatctctgttcacaacaatgctatacagttcattacaataatgggaagaaatactgtttaattattaaagtaaaaatcacaagagatgttatcagagtaacattaaattacatgactgacatcaagtaacatttaatccttataggttatctctgtgaaatgataaactactatgattagattatcaaaaatgtttattttacaatctactattcataaaatatgtagttcaaaaaaaaaaaaaaaaaaccttacctgcatttgacgaagtggtcctgctaattgttctgttaatttgggcatctcactagactataaaagaaaaggaaaacaagatataaaaacccacgtttaaagttactggtttttcacactacccgttttaacaaattaaagcttgtaagatagtcacatatcaaattataagaccttagtcatcagcatttagagtttctaatcaattcagtttacacaggcaaaatcactattcctctcatcccaaattataatattctgttattacatttcagaggaaaatacaccgctaaatttgcaaagtgtgctaactagctcctttttgtgattacatatggaactgagggagggtaaatattgtaaacatacatagtagtttagttacatcaacattaaagggttttatcatagtttaactttgaaacagttttagtttctaggcaactttcaatctgtagaaactgaaaagtttgaaactgaaaactcaggataaagtacgttaaaaatagtgtccctaatttttattttacccagatgttctaacaaagtataagacagctaaaagtttaatctgagtttcagtattcttagtattgctttcccacagctgaaaattctgtcaatttctgaattagataatggagtttcaggtgtacactaagtagccaaattaagttggacaagctgcttaaattctgtgtactggttttctgccctgtcaaagaaaaataaaaccagatcctcaaaatgagtaggcttatgatgagaataacagacattatttgtgaagaaatttttgacaaaggtactgtacaaaaataaaattactataagaatgatatgtatgtatgtatgagacagggtttaattaaagtaattatggctatttttttttttttttttgagacagagtctcgctctgttgcccagctggagtgcaatggtgcaatctcggctcactgcaacctccacctcccgggttcaagcgattcccctgcctcagcctcctgagtagctgggattacaggagtgccaccacgcccagctaatttttgtatttttagtagagacggggtttcaccatgttggtcagactggtgtcgactcctgacctcatgatctgcccgcctcagcctcctaaagtgctgggattacaggcatgagccactgtgcccgatcgctaattttttttttttaaagcaattgtaggctagttgcgacatatctgcctttattttaagcaccagtacttataaaggacttgattttgatttgcaacatgtatatatgtataataaatcaagaaccagattccatattattgctgctaaaaccaaaaattattgatgaatggcaaaaaagcaaaatagccagaatgaccttaacatctcagtttaataaagaacccaagactgcgaaatgtctttgatattatgtctattcatggtcaacagctactcatcacattcctctctgctattcactataggtggaaggcaccagtcctgatgtgaggaggttaattgtgattttaacaatgttctcccaccaggtatgtacagtttgttccctcatctctcctataggcctcaatataagtttcacttcattagtgaggccttttctaatcatcttatttaaaatagtaacaccatctccccagtgatctttgattcttctcacttttctccaaaaaccttcacccctatttgacagaatgtatgtgtactgtatttctttatcttcatccactaacatgtaagtatcaggaaagcaaacatttctgctgcatctctggtgcttagacctgtacactgcccacattgggtgcttaataaatttttgtatgcacttgatctttatattataaagatttacataaccttttaaatattatttttaaaatgtagagacagttttataaatacattttaaaatagaagttattatatcaagcaaatttcatcttacttataacaagtattttactatatttactagaagacaatgttctttttggcagaaaacattctgttaaaagcatcaagaaaaatccacatgacaatcagtacaatcttccatctcaatgttaaaaggcgccaccacaagaattgatgacactgtatataaaaaagtgtggtttcactgaataaatcttaactgtatatattgacatcttgccccaagatttaagagctgtggtttagcttaaccaactcctttgaagagggaatataattggcttctcagaaaaaggaactattgtaatagtgccaaaatataaaacaacaagaacatgcaaataatgaaaagtaagacaaaatttgacatgggtggaagaccacttatccccaaactatttacaaacctacatctctgaaccttcctattccaagtaagtttgacaaatgttcttaattatctttatcttggaaattgatataataaaattttgagcctaaggaaaaacaaacacaatattttgtaaagtaatgcattccttttgtatgcatatttcatagatgcatggtaggcaatcccaggaaagcataaactgtttttggattattgtcctatttgttatcattgccactaacagctgtgattctaatcagtaatcagggacctgagaaaagtacccatctacttcaagaagtaatatatttgatctgattaataaatatggaaacagttaacaggtaaacagaccaattaagtgtggtttcactgaatacatcttaactgcatatacggacatcttgccccaagatttaagagctgtggaacttaaaaaaaaactaaacaatttgttctacacaatttacttaaaagttaaactaagtatgtatagtaaaaggtcctccaaaaatttagaatattaaattatttttagaaggcagatgtccttgtcttattctcattctatccacttcatctacaataaataaagtcttaaatttgaaatgcaaaacaatatatcttacttttaaaaatgaatcaaactggtttttggaatgcagtacaaggataattagtgttcttatgtgttccacccagcacttcattttttgatttcttaagaactgttgaaagtgaactaattactcatatgaaaaaaactgctgccaaaccaacaaggatcttatattcactacctcaaaccgtgcccatgaaaactaatgtttcagttcctagcaggatggactgcttcgtcattattcttcaacaccggggaggagagttaattcaacctcacttcccccttttatttttatcagactttcctagttttcttctcactcatctttttatttctaggactgtctaggacttggccaaatgttcaatgaattgggttacagaacaaatttaaaacttaaaatctaattaatggtgattgttgacaaatcttattttattctcctttctaataatacgtatttaatcatttaattttcttagtacatttgtgttaaagttgctgtgatttccaattaacattaccttataatatgtaaatattagtaatatttgataatatagccataacactattaactacatgatgtgtgaattaataaataagatgtgctgaatcaattaacttacattctcttgaaacacaaagcagcttaataatgctgttgcctgttctgcagaaaggtcattgaaaaggccattaaacatcatctcagttagaaggagctcatcagcactacaatggcaaaacaaaagaataaaatgtcagaatataaagacacacatgcacacacatatgcccttaacgtgtagtttttaataaaatatattatttgaccttaaggagtaatcaatgaggaatgacaatgatttatttaaggacatagtagatctttaataattaccaatatattatataatcaatgtaaaatggggatttcacataaagattccaaatatcaaaatgcacacattcgtgaaataagaacaatttcttaacctttagtatgctaggaaaaatcatcactgtcatttattttctagggccaaaggactcttttaattatttttcagttattttacaaataatctgtagaataaagataatgaaaaacaattttactagaaatcttaattagaatgtactcataagaagaaccacatttttttatttttatgttttaattttttaaagtttttatattatagtagagatggggtcttgctatgttgtccaggctggtctagaactcctgagctcaagtagtcctcccacctcggtctccccaaatgctgggattacaggtgtgagacactacacctggccagaagactcacattttaattcatattttccaaaggctgaaagtgtatataaccaagatgggcaagagcctttaaatgcaacaaactgctgctcaccaattgtcatccacaaatctgaaaaatatccatctaggaaatacaattctagatttcaagtacatctctaacaggtaggtactagctcatcactacgtctgtttcttcttgcacttgcactgtcaaaatgtacaagtccagatttacatctcttttaagttctagcttattacttttgattcctcttttgcatcatcaaaatacagttttttaaactgacaacttgattttgttgagaggaaggtcatcttctttgctccataattgtgaaacattttcatatacagacttataaggacaatatatttattattacaaagattagaatgatcaattcaacaggttttaaaaaatttcttcatcatctctttccaatttccttatatacacaactgtgtatttgaccacttgtggaccatataaggaaactttggtgcacaaataataaaagatgaaagactattattacaagtccttttagcaaaatgagatggtccaggttcttatcatagacgttacataactaggccctttctgttgaatgattacatgaataataatctcatatatatatatatccctagaaatatattgttcagcagagcacagtggctcctggctcatttgggaagctgaaacaggtagatctcttgagcccaggagttcaagactagcctagcaacatggcaaaaccctgtctctacaaagcaatacaaaaataagctgagcgtggtggcacacgcctgtagtcccagctactcaggaggctgaggtgggaggatcacttaagcccaggaggtcaagactgcactgagccatgatcttgccactgcattccagcctgggtgacagagctagaccttgtctcaaaataaataaataaataaataaataaataaataaataaataaataaataaaaatattgttcatgcactagttattatgtctgagaatttacttagggtctgagactttgcttatataatcaatctcaccattatcactttgactacagtgctttttgtccctttgtgtttatcttctgatttgagtaataactgcaaaatatcttcacttatttttcttcttgggtggaaaatgaaaaattctgaatttgcaactgtgttcaattcaagctaaaaaagaaacactacaaagatgatgtttctagacttctataatcagggttcaattgacccatacaataactgtactgtattattaaaaaagtaaactttgcctttattttttgcaaagtctttaaaaaagaataaagccatgaactattataatctttactaacagttaaaatatttataaataaaagtcaaaaactaaatttgggtctctagtgttaagcttaagagttaagtcaagcaaagagtgcaacaatacaaacgaggaaagactatttcaagaagctacagtctaacattgggggcagacaagtaaggtgataatcacagaacagtggtttaacagagtgctctaataattgatttatacaagtgttatgaggaaaaaaaggtgaggagcctaaaaccagattgaagaagttcagagcaagtttcgaagttctttgcaaaaatatgcaagaatcgcaggatatggggtgggggtgaaaggtcatatgaagcaaaaggaaaagcatgtgtggggtgtggcaacagactgctggagagggagagtaacaatatactaaattatggaatctattctaaaagcaataaggaatcactgagggacttttaccaaatagaatggcacaaaggggctgggtgctgggtgaagtggctcacacctgtaatcccagcaatttgggtggtaaggtgggcggactgcttaattacaggagttcaagaccagcctgggcaacatagcaagaccctatctctacagaaacttaaaaaagaaattagccaggcttgatggcacacacttacagtcccaggttcttgggagactgaggcaggaagatcacttgagcctggcaagttgaggctgcggtgagccgagattgcaccactgcaccccagcctgggcaacagagcaaaatcccatctcaagaaggaaagaggaacgacataccagatttgtgctttgggttttgaaaactcaagaagggaggcaacgaataatcaggagggcaactgcagtaattgaggccaaaaataatgagggatacacattagccagtggcaatgtttaaaaaggcaaaatgggtgagagaaggagtctaggatgatgccccagtttttgcaaatttgggggaaagttaacaaactttgatataatattgttattactataaatgaaaaatgtatcttggaataaaatcaatttccattctttcaacacaaaatctagttgtagatatctaaaggaaattaatttctatattaattgtaaaacaggtaattattagaaggaaataatcccaataacattagcatataaatcagtagaccagtactgcagtttagatttaatcctggatatgttattaattaaaatccaatagcacattatcctgtgataacaactaactagggctgggtagtcactgcccccttttggtggctaagagttgtcctgttcaccacagtctcctggttctatgaagacatctgagtctgtaacatctggacagatgaacgatataattacatttttaccaagaaagtctgaaatcatttacaaggcctgtaattctctagtcctgtccatcctggccatgctgagtacataaaaaactgtttcaaaagtgtcttttatatattcactgagaattatgatcatcactatatggacaaaacaagatatatcttcagactggatattgcttgagctaccagtttatgactttccagttaaggaggacagaggcaagctggctcctaaggcaggagacattcctcgtggtgggaaataacgaacacattttttagaacagtatcataaattgtattttctaaagatggccacaacagcatctcctataccacattcttctagaattgcactgatctataaagactgccatgtgcatacgtggaaatttcaatttcaattaaaatgatataaattataaaattcagttcctttgtctaagcacacatcaaatgctaaatagtggctactatactgaacagtgtagacacagaacaatccaattatcacagaaagccatactgaacaatagccacttccccatcaagagttggaatctaattatcccccacttgaatccaggagggtttatgactcacctgtaatcaagagaatgtggtggaaatgatggtgtatgataacaaagctaggttacaaaaggtaaagctaggtcagaaaaggcaaccttagccagctagaagactcacactggagccttcagctaccatgtaagcatcctgaggctgctgccatactgtgaagaagcccaaaccagcccacatggagagaccacatggagaagctctaacagagagagagaggtcctaacattccccagccgctccggactcctactgtttcagcttaaccacctgtctgacggcaatcctgggggacagagccagaaccatccaaatgagctcttcctgaatttctgacccataaaaacaataagaggataaagtcactgttgatgttgtaaataatttagttttgaggtcatttgtgacaaaagattactgaaacagaaaataatataaccagttttaatctgtggcttataataagttctgttgtaaaatcctattattagcccaaaatctcattacaatttgctatgcacgtaacaagataatggttactaggctaagtttcaaggtgggaaaatgttaataatttttaaaaagtatacaaaattatatataagctaagattatgtaaaaatcccacaaggcattaaaaaaagtcaaaggaaatacatacaaatgctaggagcgcttgtgttaattactgagatctaagatttttctaatttctcaatttcatggttcaaaactgtatttagtgtggaagatattgtacaaactttatatttttaagaaagctcttttttcctaaagataatggttatttttaaaatcacttaaaactgcgaggcggagttgcagtgagctgagattgcgccagtgcactccagcctgggcaacagtgagactccatctcaaaaaaaataaacaaaaattaaaattaaaaatgaaaaaaaaaatgaactttctagaacaataaccagattttacctgcttatctcacaagccactcgtcctttcatctctattacatcagaagaagtagcaaatcccaaccttcttaaaacacgtttgcgacatttgagttcatccatttgtaggactgttcttgctttcttcagttctcgctttgcagatttaatatctattgcaatctaaagcacatgaaagtataaagaaagttcaataataaagtgaacaatgtacaaggagatttattcatgaaatcaaacaaaaaatatttttaaagaacatcttacagtatacttctgggttaaagcttcagtgctggggagactggggaaactggagcttcttagatacattcccggaacattacacaagagtaatgatgtatctgtaaagttattaaatactacctaaaatattaagtacatggaaaatacaaaatgtccatttgaaaaatttgaggcagagcaagcagatgttagaaagtgtaaaaagcttgagacagagaacagaggccgggcgcaatggctcacacctgtaatcccagcactttgggaggctgaggtgggtggatcacgaggttcctggccaacatggtgaaactccgtctgtactaaaaacacacatacaaaaaatcagctgggcatggtggcgggcgcatgcctgtagtcccagctactcaggaggctgaggcaggagaattgctttaacccgggaggtagaggttgcactgagccgtgatgatgccactgcactccagcctggcaagaaagcgagattccgtcttaaaaaaaaaaaagaaaaaaaaaaaagagaacagagcacagctcttgcttaaatggagagaggtaaggaggaaggctagaaggaggagagtgagctggatattgtgagctagacaaggtaggctgtaagagtagaaaaagtcagtggtgaatttaggataggctctcccaagacaggattcactagacaattaatcacggtccaaaagtaccaatcccagcagctctagcttttcatccttagggcatcagggggtagcttagagaacagggaaagaaaaatgagggtacagaaatcttttctcttgactatctatatttcccccatgatgtcctgaaaactattccttctctttgcccttaagttaaatcacgaatttgcctaggctggaaatggttttagcaaagagaataggcctttattcaaaacataaatgaaaccttaaaatgaaaatgtatcaccttgatgtcatcctttagagtagataagttttaaaatttagttaatcagtaaatattacatattttctgactatgacaagcatacagtagtacaagaacaaaaaacaatggtatcctgaagtggtggttcagaaaaacaccgacagaaaagttttgataagttgaaatccgaagataatggaattttttagactgtttattaaacttctactaaggaggaaaaattatgaaggtgatcagcaactgatatttattcagagactaccaatgtcctctatttctagtgctttacattatttcattcttatagcaatcctaaaaggtagggaactaatattaaatctgcattttacagatgagaaaactgaggcacggagagattactaagtaaattggtcaagaatacagagctactgagtgataaagatggagttcaaagccaggctagcagaccctagaatccaagctcttttcaattatttatattgctgtgaacagggctactgagtgataaagatggggttcaaacccagggtatcagaccctagatgcaagctcttagtgattatttatatttctatgaacagatgtgtagtcacaatgccatgtcataggaagcaatgctttccaagctagacaatgaatgctatgctacctagcatgacttatcaggcctaccagagtaaaaggaacaaaccattgttttttagggtttctttgactgaagtgactgaggatgcctatgtgagcagagcaaagcatcgtgctaataactgtgaggcttataaagcttagaaggtagaagagagtccaatatttaagacattttttcttgagtaatgtttgtattttgaatataaaaatacgtgaaatattttagatataatgggttaaataaaaatattactgaagttaatgccactggttttttctttcttttttaaaatgtggctactaaaaaatttaaatgtggctgacaccagacaatgctgtacaagatctttcccaacatatttataaaagaacacagatatacagttggccctacatatccgtgggttccacatccatggattgaaccaactgtggatcaaaaatattgggaaaaaaaatgtctggactgcacatgtacactttttttttgtttttgtttttttttaaagagatagggtctcactctgtcacccaggctggagtacagtcgtgcaaccatggctcactgtagcctcaacctccttggcttaagtgaccttcctacctcagcctcctgagtacctgggatgacaggtgcatgctaccatgcctggctaatttttaaaatttttttgcagtgatgggggtctcatcatcttgtccagggtggtctcaaacttctgggcttcaagtgatcttcccgccttggcctcccaaagtgttgggattacaggagtaagccactgtgcccaggctgtatttttcttccattaaaaaaaaaagaaattatatatatacacacacacacacacacacatacatacacatacacacacacacacacacatataatgtgcttatatttatatatcatgtgcttatatacatataagcacattatagacaatgatggggagggggcaggaaaagaaaaaaaaaagaccactataatcttattgctgtaacacaaccacttaaagttttcctttcagtcttttctggtgtattttatatttttgctaaatagtaatcatagtccacttcaatttcagatccttttttcatgttatgcttatgcatgagctttcttacatgttattgcagagtctccataacaactttatttagccagtcccttcagccagacaaggtctttttcagtatatttgagcagctcagataatgccttcaaaccacctccaaggatgctttccaatcattcaatcacgctcaagtctacctgttcttgtgttgtgaaaacataaggccgaccctggtggccatggagggactgacagcagggagagagctgctgcaatggtcctggttaagagatgaacaggtgagaatcacaactggatatctgtgtaagtaatgaaagtttgttgtgtcccagtttcctcatcttgagaagtacctggcaagcttcctgcctagcagcacttgaaggtgggtcagagcatagatgtgttcactgagcatgcagccagtattgtgtatatgctacagcaccatatgatgtaagttcacaaaaagctagaagggagagtgctttaaaactatgaactgaacacattactctattaaaggagtttctactcatgtatttatccaataaacactgggcatttactttataaagacagaccattatgagaaaatgtaaagttaaaatgaaacatctgactctaaggagcttaaaatctagtttgtgagacacaaagacaaatgtattgataaaagtggtatgtgataaaagttgaaaaagtacaacagcaaggagttgtaagtttcatggaggaaaggagatttgtatagtataatacattccagttgaaaaaaagtaggtagtggaaaggattgtgttcacgtcaaaaagctttttctaaatttgctatacagaatgcttataataatggttttactggttagatattacagctaattatgctaaaaagctgaactactaacatttgacgctattaagatggctacagcaaaaaccacagacaataacacatgctggcgaagatgtagagaaagcagttatcttgcaaattgctagtgagaacataaagtggtgtagccattttggaaacagtctggtagtttctgagaataaaggtaaatatagagttaccatatgatccatcaatcctacctaattccactcaagagaactcaaaacatccatacaaaaacttgtatacaaatgttcacagcagcattattcatcagagccaaaaagttagaaaaaaacaaatgtcctgtccatcaactgatgaatgggtaaacaaaatatggcatatccacataacaaaatataatttagccaggccaggtgcggtggctcatgcctgtaatcccggcactttgggaggctgaggcaagtggataatatgaggtcaggagttcaagaccagcctggccaacatggcgaaaccccgtctctaataaaaatacaaaaattagctgggcatggtggtgcgtgcctgtaatcccagctactagggaggctgaggcagaagaatcacttgaacccgggaggcagaggttgcagtgagccataatcatgccactggactgaagcctgggtgacggagcaggactctgtctcacacacacacacgcatgcacggacgcacgcacacacacaagatttggccttaaaaggaatgaagtactgatttatgctatgacaggcataaaccctgaagacatgctaactgaaagacagcagacacaaacatcatatattacatgattctatttataagaaatatccagaataggcaaaaccatacagatagaaagatttgtgattgccaagggctggaggatgggagaaacagagagtggctgctaatgggtataaagttccttcagagggtgagaagaatgttctgaagttacatagtggtgatggttgcaagtatctgtgaatacactaaaaaccagtgagttggacattttaaaagggtgaatgctatgctgtgtaaattatatctcaaatttaaaaaagaagaaaaaacagaacatcctatgtgaaatatcaaactatagcaaaatgaactttatcttgtcttgctgatgagagctgacaggttcagagctgacagtttatttaaaagatagctcacattttcctgttttagccaattaaaccaacaggataagaaaatgacaaacacatatttattcagtgaaacatatagaattctactataaaaaccaaatttctgccatacctgtgcttttttttcacaaagcgtatacacagtttccaaatttggatcattgtgaagtggatgagaatacattcgatgctcaaaagcttctactttctgaatgacttttttcagcccttgatcttgaatgcccatatcatcaatagggtctaataaggggatgccgtcaggaaaacgtttctgaacttcctg

SEQ ID NO: 1966 - DNA, 26210 bp, Homo sapiens
caacaccccatttctttaaggaaaacaataaaaaaaccaatggcagcactggtcttgactatgagaattataacccaaattgcaaggggaggaactgtccctgaaatcctgtttagaaagccataaacaaggaaacacctgtttgtatacagtttgaagggtggtatagctagactggcaatagattcttgtgaacaagttagtagggcaatagttttgtttctttaaaggattaacatttaggtaataatgcgtacgtgaatgtttgcctagaagtcctgttccctatataataatactttgataatcatttcaaatgccaacccttccttaatataaaagttttgcgttatgttaaataaactatttttttctttattcttttcttttagctttatcttcaagccaggatgaagggagactgggcaagactcttacgccccacactgcaatttggtcttgttgccgtatccatttatgtgggcctttctcgagtttctgattataaacaccactggagcgatgtgttgactggactcattcagggagctctggttgcaatattagttgtaagtatacaggtcaacagcctacatcttgatattgctaaacatttagataagtaaatagaaaaaaaaaaatccaaaaaatccccagctgaggagaagactatgcagtgggcaagaatctcaatgttattaaaagtcacttcaggatacacaccaggttaaaaactaggttgctctttctaaaacttagtatttttgtaaaatcttagtatttttattgtgaaaggctctggctagaaatagtttttttaggggattatgacttgaaaaaactaattcacatgtagaaataactcttttattcagtattggcaaaatgaagctatttgctgaaggcataacaaagcaactcttaatttggaataatctttaaaaaatcccagttagtctctaattttttatatgcttaatctgtacacctcaaagtatatccttttgtttatatttatcttaggatgctgttgatcacaactttgtatgtagtttttaacttgatctaaattataccattaaatattttgcactgtaggctgtatatgtatcggatttcttcaaagaaagaacttcttttaaagaaagaaaagaggaggactctcatacaactctgcatgaaacaccaacaactgggaatcactatccgagcaatcaccagccttgaaaggcagcagggtgcccaggtgaagctggcctgttttctaaaggaaaatgattgccacaaggcaagaggatgcatctttcttcctggtgtacaagcctttaaagacttctgctgctgctatgcctcttggatgcacactttgtgtgtacatagttacctttaactcagtggttatctaatagctctaaactcattaaaaaaactccaagccttccaccaaaacagtgccccacctgtatacatttttattaaaaaaatgtaatgcttatgtataaacatgtatgtaatatgctttctatgaatgatgtttgatttaaatataatacatattaaaatgtatgggagaaccaaatccacacttgcaggcatttgtagtcaactgtaatcaaacaggtggtcaataatttaaaatctcacattcctttagctgactctacaagtagaggctggcagcaaacacaatatctctcttgattttggtgattcctaagagaaaagaaagtaaggtttaaactttcaagaccacaaaacacctaacttgcctctaccgaaattttaaagccagtataccaaccctgattcaactggtaagcgagcagcctagaaagtcaaacaccttgctgaacacctagaggaatttgcagccacctctgtgaggtggaaaacatacaagccagacccctgttcttttgactctgaaatactccatgggggctggccaggaaagaggtgtctagaactgtttaaaaagataaatgctaggtcgggcgcagtagctcatgcctgtaatcccagcactctgggaggccgaggcgagcggatcacctgaggtcaggagttcaagagcagcccgaccaacatggagaaaccccgtctctactagaaatacaaaatcagccgggcgtggtggcgcatgcctgtagttcagctactcaggaggctgaggcaggagaatcgcttgaacctgggaggtggatgtggaggttgcagtgagccgagattgcgccattgcactccagcctggggcaacaagagcgaaactctgtctccacacactaaataaataaataaaaataaaaataaaaaaaattatagggaaggactaaactgtctaaagaaatgtaaaatccaaagacttggattttcaacctatatcagaagacacttttttttcagttcccatgtgaaattctttctaggccaaggaaggacaaatacaaattttgattacaaattatttttaaaactttgacacctacacttaaattctgagtcattaaacaggcctacatttatcaactgtggaaatatcagccagtttttgcaaacctcttcttaggacactaagttgtttgcagaaatcactagcattgactgactcagcaacaatgtggttatattctttgattaacttagtcctttttcttggtcaagagtcagtagacaggactgaagcttatgccccttgcccccccaccaccactccattactaccaccttggtttagccatcctttcttgatctgttctccccacttctactgtgctactctacagacttgccctgaatgtaagagcaacaattaccttgtaaagtccaagttggggcaggtcactcccaaactccacacctccagtcactgcagagttgagaagcctggggctgggaactatggaatcatttcctttctcacttcaacccctactcctctactcactgcccattctgctccagccacactggcctcttgctggtgttcacgtacatcaagcatacaccaaaggccttaactgccaccttccctgtggaggccctagaccatcatatccatctgccaattctattgtcttttctgctttgtttttatcttacagacttatcaccatctgataaatttaattgttgacttattgtctatctccccacactagaatgtaaactccatgaaggcaggggtgtctttttgttcactatatcccctagtgcttaaaacaatgcctggcatgtagttagcgtacaattaatatacgtaaatgcatgtatatataaaatctcaacttttcccccaacacactaaattttatagaaacactagtagatagctctccatgacaatgcagtgaagaacatctcaaaacgtcctcctaggttgtggtccagggctcaagatttgcttcaccaaatttgtctaaattagaaacagcttatccatttgatactgaccttctgcaaatttattttccagctcagtgtttccaatggcttttgctgcttgacacatttgtcgaagcaattcttccaggcgcctcatacaacgaattatgctgcctggatagaaaaggaacaaaacactggtaaaatggaaataatcaggaacagcagaatttttgttaagaggcaaggcaggagaacacaggataattaatagtactttgagggacttcccatgaagtaaatcatggttaggtactggagaaagctacaaagatgaaaggcttaactcccacctttgactaatggtagagacacctgtttattactaacatgctgacacttggtattaagtaggaaaacaaaatgccctagaaggagggagcaactttgggtgaaggctgcaaggatgacataatctgtgtctgtaagaaccaggcagtatctctcaggcagcagcaacaagggaaggaccaccacgacaatgcagaaaagcctggcaaactgcagctattcaaggaccctgagtgtggcctagtgaggcatctggacaccatccataccatctcatagaatgcaacagactgtttttagcaggagagtaacaagataaaacttgtcattttaaaggtgcattcattcttcttgaccttagattctttcattagtacgttctttacacagtgttctcaaggagcacaaggaaagaagccttttcccatgggtctagaatctgtttgagaaaagtgtttgtatcaaagctgaagctataaacatagtttcacttttgctagacttgtccaaagaggagcagagattgtgagatcctttctctaagtgctacctgcctaaatctaaaacgcttgacttcatttttaatatatgaaatacattaggaataccagttctcaaaatgcagtctgtaggaacaatgaactatttacactattaacaattattaaattaataataattatttgttatttctattctcagctgctaggaatgcaggctccaatactgccttgcaatgaaacaggaaatccaactgcagaaacttctgggtgtcaagagagagggtaggaattgggatagagagggtaatgtcatattacctatgcaatcagatattaaatgtttatgcaaacaagtatatccaaagataattaaattaggtagtggctcaaaatgtaactagatttttacctgagaccagattctcacaggtcatttaggattgaaatgaaatcctttacaaagtcctctgctgcatagggcattaaagagccagacacattctcaaacattgttttgactgacttcaaatgtgtaccaagaaacacaatgtgatactattatttcacaaattttagtaactcgtgttaaccagaatctgtgaaagttatcagagaccaaaccatacgaagtaaattactaagataaagaataaactaaggcaagtaaatgcacattcaggccagagagcactgtcatgtcacattttgtaaacatttcgactcaatttctggaaactttagtttcgacacagtttcaggtaacaagcaaattaggccagtaggcacaaggttgcatatacaatgactgtggttgttgcccacagagtctcatcaacaaatcactgggtatgtgcacaaacactaactgtccagagctgcctgaaacatagaggctactccccccagggattaatgaagactgacgattaagtagtgaattgtctagcatctctcctacctactacagttctctgtaatccaagggctcttcttacacccacctttataagtcatcctgcctcatcagcctgactaagtgctagacaaaagtttcaaagccatgacccatcataggctaaatgaagctgaccaaaaccgaagcaaaacaaaaccacattaacctactggtttgttacaaaattttttttttggtcctgccagagtagaaagagaaatccaattctttctagttattgtctttaaaaaatttttcaaatagtggtaaaatataaaacataaaatccacctttttaaccatgttaaagtatacaagtcagttactgcccttttttatattcaggtttactacattctggaagaactcacatggagacagaattcacacaccataaaattattttaaataagtgtacaactgagtggtttttagtatattcagacttgtgtaaccatcatcattatctaattttagagcatttttaccacccccaaaaaaccttgttcccattaagcagttacatgtcttcctgtccctccagcccatggcaaccacgtctatgctttgtctctatgaatctgcttactctggacatttcatataagtgaaattatacactatgtggcctttgtgtctgccttctttcaacttaatgtgtttaaggtttgtccatattgtagcatgagtcagtatgtcttttctaactgaaagctgttccatttaatctttattacaatggaacaccttgccattaaaaatggcaaaaaccacaattactttggcaccaacctaatatataccacaatttattcatctatcgatggacacttgggactatatgcttttatttaagagcattttaataaacatcagccttacccggttgatgaacaaaacagcatcattctcattaaggagagaaagcagcagattttcccgaacagaacttctgccttcagctttctggcataccctaaagcagtttcctacagttcatgctctgacccgaatttaatactcctatccagcctggcctcaggttagaatcacacatgtatcttgcaactacttgccgctaaaccccagcttaggctgaaccctttcttgagagcagagactattgctcacactgtaactagcatggtgcctgattcccactagggtctcagaattattcattaaacgagtaagtatcaggtactaaaactgtgccaaaatgtaaagacagaaacaattactaataaattgttactctattattatcagcgagaatacttttaaaagacaaatccactggaaaaccactcatgacactgatgatgctaagaaagggttaaactgctacttgaaaggcatgtgagagaatgtgtgtggtggggacagagttgaggaatgcaattcacagtatttgctttcaaaacatgtggcatacagagggagcaggactgaaaaaaaataaaaagcatatggcaggcagaggtacagtaaatagtttcaagagataattcatcatagaagctttcctaatgacacttgctcagtggaaagcaaatcctttgtcatccttcatagttaagagtacaatattgtttatgtagagtcagaaataaatagtaacagcctctggattacttgactaaaaccctaggcatcagcccatacaaatagtttgtttaaactgtcattcaaatttagtttaatggaaataaaaaacagctaaattctgtcattttttttccagggtgataacagaataaatacttagtcttcaaaatttctcaactgaatcacaatatgaacttttcttttgcattacacatcccccaaacacatggttttaatcattacagtgttaactagcctcagttaatgtttgaagaatacttaaaactacttctgaggctcaggatatgaaatgaccagacacttttattttcatatgaaaagaaaattaagaatcttattaggaacaaatatggtttgcacacagcacattagaaagttccaatgcaattattgtctgcctgtaaaaacagacacactgtactgtgtgctacagctttgattacagtatttttccaatcataaaacatgtgtaggccagctgcagtggctcatgcctgtaatctcaacaccttgggaggctgaagcaggtggatcacttgagcccaggagtttgagaccagcctaggcttcatggtaaaatcatatctctacaaaaattaacaaaaattagctgggcatggtggtacatgcttgtggtcccagctactctggaggctgaggtggaaggatcacttaagcccgggagatggagggtgcagtgagccaagatcacgccactgcactccagcctgggtgacagagccagaccctgttgcaaaaaataaaaaacaaccatatacaataacgagatgaggaaggaatggctattcttgaaatggaagcactatgtaacactgtaaaaacaaaagagagaaatactatcctaagaaaatgaaggttctcattttttgctacttaaatcaaaaaatagttttaagggcgaatacatagtatatcccaatttttagaaaggtttaagctcatctactggctcacacaccagaaaaacataaaaattatgcagatgttagatctaatttcaagttagagctaaaaaactgaatttctcaaattttcaaactgaaatttcaagcaaactgtgatgtagaaatagcccctgagtaactgaaagaggacagaacagacttcaggaatgctggtatgctgtggaaaaagtcaactcataggtggcatctagtatgagctacaaaccatcttcaatttggcagtttaggatttatcttccatactgtgataacttctacttaggtagaaagaacagaaaaaataatccataaagacaattttatatgaattcctagatttaaaaaaaaatatactcatctgacaggccaggtctactgcccttgctttttacttttctttttttcttttttttttttttgagatggtgtctcgctctgtcacccaggctggagtgcagtggcacaatctcagctcactgcaagctctgcctcccaggttcacgccattctcctgcctcagcctcccgagtagctgggactacaggctcctgccaccacacccagctaattttttgtattttttgtagagacggggtttcaccgtgttagccaggatggtctcgatttcctgacctcctgatccgcccgcctcggcctcccaaagtgttgggattaccggcgtaagccaccgtgcctggcctgctttttacttttctaaaaaaaataaaaaataaaaataaaaataaaaaaataaaaaaaagctactctctgccatgtaccactattgttttatgtcattgtgttctgacttttcagagaagcagatattatacaaatatgagtattgtattatcaagtcttattattaggcattgaacagttactagtttcatccttatgttccaaaaagatgtcagactgaagactggtggtgctctatgtgatcgccctagtgctgctgaaacacaattgtcatacaccaacctgtgctcctgttttaagcaattttcatcagtgagtacgcaacatccctcttctcactgactcggctaaacaccattaactaattagagatgttgctaaacatcatctaggattaagacctgtttagtattactccaagcatgacttttctgtggatggagatggtatagtctagtgtagggtttaagaaattttcaggtgatccaaaatttaaggataaggtggtatggtgcttaactgaacttacatgtagttacagagaccagagtttaaatcatcgtgccctcacatcaccttggccaaactgtttaccatagtctccttgtgcaaagtggagataatatctaccctgaattgctatttggtgattacatgtaaattatacagagctcttagcacagtgttcggcatatagtacttactgggcaatgactttcccagtaacagaatacagaattcaaaggatgctttgggactgtttgactaaatgatcatttagaggaggctgagaagtttataaaccttagaaaaaatatgtaagatacaacaccataatttaaaaatgtgctataaactttaacattaaaaaccttaaaacccataaagttcaatgtagtaaaggccctcagtttaagtttttaatattctgttgcagagaagtttaacctatgcatcataaaaataactgattcataaaatcagtaatctattacttctttaataatatcagttgaaaggcctataatatttggcatgttaaacatgtaatttttctcaaactaaacctataagcaatagtagcagttcttattataatctctatacagaacaaactcatttattttcatttttaggaaagttcaatgtaaattatctcattcagtaaatacaactggccatttataaacacacaagccaatcttttcctactgaatgcagcattttaaaatatggtttcgtttaaacagtctacttatttttttgcttcttattattcacttagtccttatatttcttttgccttaattttttcatttaaaatttctcttcagttgagtaacaattattcttcagtctcttaaaatcctgctcattaaatttaatctgattcatgctgcaataacagtctgactaaagccaagtcaattacatatgcaatgactgatcattttcagctctgctatttttagtggaattatatagctcaccaggagaacaaaagtgaaaaggaaaaatacccacataaatatgacttcttagggtcatctgcttgtgactgtagaaactcatagaattacaactgcacagaattatacagtttaaaatagtttctaaaggactttctaatgaacagactatgcttattaaataatacaaagaatttgtggagaatattttttaatctatataatagggagaagatttcatttagttaccaaatattaaaaatacatattatacttgtttaattaaaacaataccatcctaactgtatttcttatactgtaaatatatatgtgtaaaatttaaccataccttcaaagacatctgtcattttgcagatatgggcaaatgtagctccagttgcccaggtatatactacatccattaagtgaggtttaaatgagcttagataagtttcctcatcaatttccaatttggcttctgctgaaacttttgcaattcttttagcacattcctttaaagataaaagagttaaaattccttacttatgatctcccatatcactttattctttaggtttccaagccagtattccaggaggtccctttttcttcctaggtattatgtctgcaatgtggacattctgctcctaagtaggcacagtgcctgttccattgctaagtgattaaacggccaatctttcccattatgttgaggtagttaactaagaaaaatgtatcaagagcatgcttttcagccagtgataccttttcaacaaagaaacagaactcttcattaaaattattcaagagcagcatttaactaatctctaattatttcattacaaaacagatttagagaaatacaaatcctagagcaaaatacatttttccacaacaatgcttaaaaatgtacatatcttcatattgttttcctctaagttgagaagcttcattcttctttacttggcaatctaaaaggccaaaaactcctaggcctatgaagactttgctggttctagaaatttaaatttcttagtgattttaaggcatgttacatgttccactgaactggccttttaattttaatcagaattttttgaattattattttaaaaatattttaacttttattttaggctcaggggttcatgtacaggtttcttatctaggtaaacttgtgactcaggggtttggtatatagattatttagtcagctgagtactaagtataatatgccacaggttttttttttcttttttcttcctcaacctctccttcctcccactctcctccctcaagtaggcaccagtgtctgttgttctgaaggggcccttttatgacacatttttttgttcctctcttgtaattccttagctcatctttccttgtctttgtctaatgttgaacagacagaaaaaatcggcttatcctatgaaaatagtaagagagaaatttattactataaactactgtggctttgaggatccagagacaatttcttatgataaaacagattttaaaactttgttataggctgggcacagtggctcacatctgtaatcccagcactttgggaggccgaggtgggaggatcacatgagctcaggagttcgagaccagcctggccaacatggtgaaacctcgtctctactaaaaatacaaaaattagctgagtgtggtggcgggcgcctgtaatcccagctactcaggaggctgaggcaggagaatcatttgaacgtggaaggtggaggttgcagtgagcccagatcacgccactgcactccaggccttggtaagagagcgagactctgtctcaaaaacaaaacaataaaacaaccaaactttgttataaaccagaatgaaaaaatgtgcaaaaaattaaaaataaactaaatcctagtccttcaagataccattatcagtactgaggaagaaaatgacacatgcactgagctgtcaatacagcctatttacattatgaagcttttaatctctgttcacaacaatgctatacagttcattacaataatgggaagaaatactgtttaattattaaagtaaaaatcacaagagatgttatcagagtaacattaaattacatgactgacatcaagtaacatttaatccttataggttatctctgtgaaatgataaactactatgattagattatcaaaaatgtttattttacaatctactattcataaaatatgtagttcaaaaaaaaaaaaaaaaaaccttacctgcatttgacgaagtggtcctgctaattgttctgttaatttgggcatctcactagactataaaagaaaaggaaaacaagatataaaaacccacgtttaaagttactggtttttcacactacctgttttaacaaattaaagcttgtaagatagtcacatatcaaattataagaccttagtcatcagcatttagagtttctaatcaattcagtttacacaggcaaaatcactattcctctcatcccaaattataatattctgttattacatttcagaggaaaatacaccgctaaatttgcaaagtgtgctaactagctcctttttgtgattacatatggaactgagggagggtaaatattgtaaacatacacagtagtttagttacatcaacattaaagggttttatcatagtttaactttgaaacagttttagtttctaggcaactttcaatctgtagaaactgaaaagtttgaaactgaaaactcaggataaagtacgttaaaaatagtgtccctaatttttattttacccagatgttctaacaaagtataagacagctaaaagtttaatctgagtttcagtattcttagtattgctttcccacagctgaaaattctgtcaatttctgaattagataatggagtttcaggtgtacactaagtagccaaattaagttggacaagctgcttaaattctgtgtactggttttctgccctgtcaaagaaaaataaaaccagatcctcaaaatgagtaggcttatgatgagaataacagacattatttgtgaagaaatttttgacaaaggtagttactgtacaaaaataaaattactataagaatgatatgtatgtatgtatgagacagggtttaattaaagtaattatggctatttttttttttttttttgagacagagtctcgctctgttgcccagctggagtgcaatggtgcaatctcggctcactgcaacctccacctcccgggttcaagcgattcccctgcctcagcctcctgagtagctgggattacaggagtgccaccacgcccagctaatttttgtatttttagtagagacggggtttcaccatgttggtcagactggtgtcgactcctgacctcatgatctgcccgcctcagcctcctaaagtgctgggattacaggcatgagccactgtgcccgatcgctaattttttttttttaaagcaattgtaggctagttgcgacatatctgcctttattttaagcaccagtacttataaaggacttgattttgatttgcaacatgtatatatgtataataaatcaagaaccagattccatattattgctgctaaaaccaaaaattattgatgaatggcaaaaaagcaaaatagccagaatgaccttaacatctcagtttaataaagaacccaagactgcgaaatgtctttgatattatgtctattcatggtcaacagctactcatcacattcctctctgctattcactataggtggaaggcaccagtcctgatatgaggaggttaattgtgattttaacaatgttctcccaccaggtatgtacagtttgttccctcatcactcctataggcctcaatataagtttcacgtcattagtgaggccttttctaatcatcttatttaaaatagtaacaccatctccccagtgatctttgattcttctcacttttctccaaaaaccttcacccctatttgacagaatgtatgtgtactgtatttctttatcttcatccactaacatgtaagtatcaggaaagcaaacatttctgctgcatctctggtgcttagatctgtacactgcccacattgggtgcttaataaatttttgtatgcacttgatctttatattataaagatttacataaccttttaaatattatttttaaaatgtagagacagttttataaatacattttaaaatagaagttattatatcaagcaaatttcatcttacttataacaagtattttactatatttactagaagacaatgttctttttggcagaaaacattctgttaaaagcatcaagaaaaatccacatgacaatcagtacaatcttccatctcaatgttaaaaggcgccaccacaagaattgatgacactgtatataaaaaagtgtggtttcactgaataaatcttaactgtatatattgacatcttgccccaagatttaagagctgtggtttagcttaaccaactcctttgaagagggaatataattggcttctcagaaaaaggaactattgtaatagtgccaaaatataaaacaacaagaacatgcaaataatgaaaagtaagacaaaatttgacatgggtggaagaccacttatccccaaactatttacaaacctacatctctgaaccttcctattccaagtaagtttgacaaatgttcttaattatctttatcttggaaattgatataataaaattttgagcctaaggaaaaacaaacacaatattttgtaaagtaatgcattccttttgtatgcatatttcatagatgcatggtaggcaatcccaggaaagcataaactgtttttggattattgtcctatttgttatcattgccactaacagctgtgattctaatcagtaatcagggacctgagaaaagtacccatctacttcaagaagtaatatatttgatctgattaataaatagggaaacagttaacaggtaaacagaccaattaagtgtggtttcactgaatacatcttaactgcatatacggacatcttgccccaagatttaagagctgtggaacttaaaaaaaaactaaacaatttgttctacacaatttacttaaaagttaaactaagtatgtatagtaaaaggtcctccaaaaatttagaatattaaattatttttagaaggcagatgtccttgtcttattctcattctatccacttcatctacaataaataaagtcttaaatttgaaatgcaaaacaatatatcttacttttaaaaatgaatcaaactggtttttggaatgcagtacaaggataattagtgttcttatgtgttccatccagcacttcattttttgatttcttaagaactgttgaaagtgaactaattactcatatgaaaaaaactgctgccaaaccaacaaggatcttatattcactacctcaaaccgtgcccatgaaaactaatgtttcagttcctagcaggatggactgcttcgtcattattcttcaacaccggggaggagagttaattcaacctcacttcccccttttatttttatcagactttcctagttttcttctcactcatctttttatttctaggactgtctaggacttggccaaatgttcaatgaattgggttacagaacaaatttaaaacttaaaatctaattaatggtgattgttaacaaatcttattttattctcctttctaataatacgtatttaatcatttaattttcttagtacatttgtgttaaagttgctgtgatttccaattaacattaccttataatatgtaaatattagtaatatttgataatatagccataacactattaactacatgatgtgtgaattaataaataagatgtgctgaatcaattaacttacattctcttgaaacacaaagcagcttaataatgctgttgcctgttctgcagaaaggtcattgaaaaggccattaaacatcatctcagttagaaggagctcatcagcactacaatggcaaaacaaaagaataaatttaaaatgtcagaatataaagacacacatgcacacacatatgcccttaacgtgtagtttttaataaaatatattatttgaccttaaggagtaatcaatgaggaatgacaatgatttatttaaggacatagtagatctttaataattaccaatatattatataatcaatgtaaaatggggatttcacataaagattccaaatatcaaaatgcacacattcgtgaaataagaacaatttcttaacctttagtatgctaggaaaaatcatcactgtcatttattttctagggccaaaggactcttttaattatttttcagttattttacaaataatctgtagaataaagataatgaaaaacaattttattagaaatcttaattagaatgtactcataagaagaaccacatttttttatttttatgttttaattttttaaagtttttatattatagtagagatggggtcttgctatgttgtccaggctggtctagaactcctgagctcaagtagtcctcccacctcggtctccccaaatgctgggattacaggtgtgagacactacacctggccagaagactcacattttaattcatattttccaaaggctgaaagtgtatataaccaagatgggcaagagcctttaaatgcaacaaactgctgctcaccaattgtcatccacaaatctgaaaaatatccatctaggaaatacaattctagatttcaagtacatctctaacaggtaggtactagctcatcactacgtctgtttcttcttgcacttgcactgtcaaaatgtacaagtccagatttacatctcttttaagttctagcttattacttttgattcctcttttgcatcatcaaaatacagttttttaaactgacaacttgattttgttgagaggaaggtcatcttctttgctccataattgtgaaacattttcatatacagacttataaggacaatatatttattattacaaagattagaatgatcaattcaacaggttttaaaaaatttcttcatcatctctttccaatttccttatatacacaactgtgtatttgaccacttgtggaccatataaggaaactttggtgcacaaataataaaagatgaaagactattattacaagtccttttagcaaaatgagatggtccaggttcttatcatagacgttacataactaggccctttctgttgaatgattacatgaataataatctcatatatatatatatccctagaaatatattgttcagcagagcacagtggctcctggctcatttgggaagctgaaacaggtagatctcttgagcccaggagttcaagactagcctagcaacatggaaaaaccctgtctctacaaagcaatacaaaaataagttgagcgtggtggcacacgcctgtagtcccagctactcaggaggctgaggtgggaggatcacttaagcccaggaggtcaagactgcactgagccatgatcttgccactgcattccagcctgggtgacagagctagaccttgtctcaaaataaataaataaataaataaataaataaataaaaatattgttcatgcactagttattatgtctgagaatttacctagggtctgagactttgcttatataatcaatctcaccattatcactttgactacagtgctttttgtccctttgtgtttatcttctgatttgagtaataactgcaaaatatcttcacttatttttcttcttgggtggaaaatgaaaaattctgaatttgcaactgtgttcaattcaagctaaaaaagaaacactacaaagatgatgtttctagacttctataatcagggttcaattgacccatacaataactgtactgtattattaaaaaagtaaactttgcctttattttttgcaaagtctttaaaaaagaataaagccatgaactattataatctttactgacagttaaaatatttataaataaaagtcaaaaactaaatttgggtctctagtgttaagcttaagagttaagtcaagcaaagagtgcaacaatacaaacgaggaaagactatttcaagaagctacagtctaacattgggggcagacaagtaaggtgataatcacagaacagtggtttaacagagtgctctaataattgatttatacaagtgttatgaggaaaaaaaggtgaggagcctaaaaccagattgaagaagttcagagcaagtttcgaagttctttgcaaaaatatgcaagaatcgcaggatatggggtgggggtgaaaggtcatatgaagcaaaaggaaaagcatgtgtggggtgtggcaacagactgctggagagggagagtaacaatatactaaattatggaatctattctaaaagcaataaggaatcactgagggacttttaccaaatagaatggcacaaaggggctgggtgctgggtgaagtggctcacacctgtaatcccagcaatttgggtggtaaggtgggcggactgcttaattacaggagttcaagaccagcctgggcaacatagcaagaccctatctctacagaaacttaaaaaagaaattagccaggcttgatggcacacacttacagtcccaggttcttgggagactgaggcaggaagatcacttgagcctggcaagttgaggctgcggtgagccgagattgcaccactgcaccccagcctgggcaacagagcaaaatcccatctcaagaaggaaagaggaacgacataccagatttgtgctttgggttttgaaaactcaagaagggaggcaacgaataatcaggagggcaactgcagtaattgaggccaaaaataatgagggatacacattagccagtggcaatgtttaaaaaggcaaaatgggtgagagaaggagtctaggatgatgccccagtttttgcaaatttgggggaaagttaacaaactttgatataatattgttattactataaatgaaaaatgtatcttggaataaaatcaatttccattctttcaacacaaaatctagttgtagatatctaaaggaaattaatttctatattaattgtaaaacaggtaattattagaaggaaataatcccaataacattagcatataaatcagtagaccagtactgcagtttagatttaatcctggatatgttattaattaaaatccaatagcacattatcctgtgataacaactaactagggctgggtagtcactgcccccttttggtggctaagagttgtcctgttcaccacagtctcctggttctatgaagacatctgagtctgtaacatctggacagatgaacgatataattacatttttaccaagaaagtctgaaatcatttacaaggcctgtaattctctagtcctgtccatcctggccatgctgagtacataaaaaactgtttcaaaagtgtcttttatatattcactgagaatgatgatcatcactatatggacaaaacaagatatatcttcagactggatattgcttgagctaccagtttatgactttccagttaaggaggacagaggcaagctggctcctaaggcaggagacattcctcgtggtgggaaataacgaacacattttttagaacagtatcataaattgtattttctaaagatggccacaacagcatctcctataccacgttcttctagaattgcactgatctataaagactgccatgtgcatacgtggaaatttcaatttcaattaaaatgatataaattataaaattcagttccttcgtctaagcacacatcaaatgctaaatagtggctactatactgaacagtgtagacacagaacaatccaattatcacagaaagccatactgaacaatagccacttccccatcaagagttggaatctaattatcccccacttgaatccaggagggtttatgactcacctgtaatcaagagaatgtggtggaaatgatggtgtatgataacaaagctaggttacaaaaggtaaagctaggtcagaaaaggcaaccttagccagctagaagactcacactggagccttcagctaccatgtaagcatcctgaggctgctgccatactgtgaagaagcccaaaccagcccacatggagagaccacatggagaagctctaacagagagagagaggtcctaacattccccagccgctccggactcctactgtttcagcttaaccacctgtctgacggcaatcctgggggacagagccagaaccatccaaatgagctcttcctgaatttctgacccataaaaacaataagaggataaagtcactgttgatgttgtaaataatttagttttgaggtcatttgtgacaaaagattactgaaacagaaaataatataaccagttttaatctgtggcttataataagttctgttgtaaaatcctattattagcccaaaatctcattacaatttgctatgcacgtaacaagataatggttactaggctaagtttcaaggtgggaaaatgttaataatttttaaaaagtatacaaaattatatataagctaagattatgtaaaaatcccacaaggcattaaaaaaagtcaaaggaaatacatacaaatgctaggagcgcttgtgttaattactgagatctaagatttttctaatttctcaatttcatggttcaaaactgtatttagtgtggaagatattgtacaaactttatatttttaagaaagctcttttttcctaaagataatggttatttttaaaataacttaaaactgcgaggcggagttgcagtgagctgagattgcgccagtgcactccagcctgggcaacagtgagactccatctcaaaaaaaataaacaaaaattaaaattaaaaatgaaaaaaaaaatgaactttctagaacaataaccagattttacctgcttatctcacaagccactcgtcctttcatctctattacatcagaagaagtagcaaatcccaaccttcttaaaacacgtttgcgacatttgagttcatccatttgtaggactgttcttgctttcttcagttctcgctttgcagatttaatatctattgcaatctaaagcacatgaaagtataaagaaagttcaataataaagtgaacaatgtacaaggagatttattcatgaaatcaaacaaaaaatatttttaaagaacatcttacagtatacttctgggttaaagcttcagtgctggggagactggggaaactggagcttcttagatacattcccggaacattatacaagagtaatgatgtatctgtaaagttattaaatactacctaaaatattaagtacatggaaaatacaaaatgtccatttgaaaaatttgaggcagagcaagcagatgttagaaagtgtaaaaagcttgagacagagaacagaggccgggcgcaatggctcacacctgtaatcccagcactttgggaggctgaggtgggtggatcacgaggttcctggccaacatggtgaaactccgtctgtactaaaaacacacatacaaaaaatcagctgggcatggtggcgggcgcatgcctgtagtcccagctactcaggaggctgaggcaggagaattgctttaacccgggaggtagaggttgcactgagccgtgatgatgccactgcactccagcctggcaagaaagcgagattccgtcttaaaaaaaaaaaagaaaaaaaaaaagagaacagagcacagctcttgcttaaatggagagaggtaaggaggaaggctagaaggaggagagtgagctggatattgtgagctagacaaggtaggctgtaagagtagaaaaagtcagtggtgaatttaggataggctctcccaagacaggattcactagacaattaatcacggtccaaaagtaccaatcccagcagctctagcttttcatccttagggcatcagggggtagcttagagaacagggaaagaaaaatgagggtacagaaatcttttctcttgactatctatatttcccccatgatgtcctgaaaactattccttctctttgcccttaagttaaatcacgaatttgcctaggctggaaatggttttagcaaagagaataggcctttattcaaaacataaatgaaaccttaaaatgaaaatgtatcaccttgatgtcatcctttagagtagataagttttaaaatttagttaatcagtaaatattacatattttctgactatgacaagcatacagtagtacaagaacaaaaaacaatggtatcctgaagtggtggttcagaaaaacaccgacagaaaagttttgataagttgaaatccgaagataatggaattttttagactgtttattaaacttctactaaggaggaaaaattatgaaggtgatcagcaactgatatttattcagagactaccaatgtcctctatttctagtgctttacattatttcattcttatagcaatcctaaaaggtagggaactaatattaaatctgcattttacagatgagaaaactgaggcacggagagattactaagtaaattggtcaagaatacagagctactgagtgataaagatggagttcaaagccaggctagcagaccctagaatccaagctcttttcaattatttatattgctgtgaacagggctactgagtgataaagatggggttcaaacccagggtatcagaccctagatgcaagctcttagtgattatttatatttctatgaacagatgtgtagtcacaatgccatgtcataggaagcaatgctttccaagctagacaatgaatgctatgctacctagcatgacttatcaggcctaccagagtaaaaggaacaaaccattgttttttagggtttctttgactgaagtgactgaggatgcctatgtgagcagagcaaagcatcgtgctaataactgtgaggcttataaagcttagaaggtagaagagagtccaatatttaagacattttttcttgagtaatgtttgtattttgaatataaaaatacgtgaaatattttagatataatgggttaaataaaaatattactgaagttaatgccactggttttttctttcttttttaaaatgtggctactaaaaaatttaaatgtggctgacaccagacaatgctgtacaagatctttcccaacatatttataaaagaacacagatatacagttggccctacatatccgtgggttccacatccatggattgaaccaactgtggatcaaaaatattgggaaaaaaaatgtctggactgcacatgtacactttttttttgtttttgtttttttttaaagagatagggtctcactctgtcacccaggctggagtacagtcgtgcaaccatggctcactgtagcctcaacctccttggcttaagtgaccttcctacctcagcctcctgagtacctgggatgacaggtgcatgctaccatgcctggctaatttttaaaatttttttgcagtgatgggggtctcatcatcttgtccagggtggtctcaaacttctgggcttcaagtgatcttcccgccttggcctcccaaagtgttgggattacaggagtaagccactgtgcccaggctgtatttttcttccattaaaaaaaaaagaaattatatatatatacacacacacacacacacacacacatacatacacatacacacacacacacacacacacatataatgtgcttatatttatatatcatgtgcttatatacatataagcacattatagacaatgatggggagggggcaggaaaagaaaaaaaaaagaccactataatcttattgctgtaacacaaccacttatagttttcctttcagtcttttctggtgtattttatatttttgctaaatagtaatcatagtccacttcaatttcagatccttttttcatgttatgcttatgcatgagctttcttacatgttattgcagagtctccataacaactttatttagccagtcccttcagccagacaaggtctttttcagtatatttgagcagctcagataatgccttcaaaccacctccaaggatgctttccaatcattcaatcatgctcaagtctacctgttcttgtgttgtgaaaacataaggccgaccctggtggccatggagggactgacagcagggagagagctgctgcaatggtcctggttaagagatgaacaggtgagaatcacaactggatatctgtgtaagtaatgaaagtttgttgtgtcccagtttcctcatcttgagaagtacctggcaagcttcctgcctagcagcacttgaaggtgggtcagagcatagatgtgttcactgagcatgcagccagtattgtgtatatgctacagcaccatatgatgtaagttcacaaaaagctagaagggagagtgctttaaaactatgaactgaacacattactctattaaaggagtttctactcatgtatttatccaacaaacactgggcatttactttataaagacagaccattatgagaaaatgtaaagttaaaatgaaacatctgactctaaggagcttaaaatctagtttgtgagacacaaagacaaatgtattgataaaagtggtatgtgataaaagttgaaaaagtacaacagcaaggagttgtaagtttcatggaggaaaggagatttgtatagtataatacattccagttgaaaaaaagtaggtagtggaaaggattgtgttcacgtcaaaaagctttttctaaatttgctatacagaatgcttataataatggttttactggttagatattacagctaattatgctaaaaagctgaactactaacatttgacgctattaagatggctacagcaaaaaccacaggcaataacacatgctggcgaagatgtagagaaagcagttatcttgcaaattactagtgagaacataaagtggtgtagccattttggaaacagtctggtagtttctgagaataaaggtaaatatagagttaccatatgatccatcaatcctacctaattccactcaagagaactcaaaacatccatacaaaaacttgtatacaaatgttcacagcagcattattcatcagagccaaaaagttagaaaaaaacaaatgtcctgtccatcaactgatgaatgggtaaacaaaatatggcatatccacataacaaaatataatttagccaggccaggtgcggtggctcatgcctgtaatcccggcactttgggaggctgaggcaagcggataatctgaggtcaggagttcaagaccagcctggccaacatggcgaaaccccgtctctaataaaaatacaaaaattagctgggcatggtggtgcgtgcctgtaatcccagctactagggaggctgaggcagaagaatcacttgaacccgggaggcagaggttgcagtgagccataatcatgccactggactgaagcctgggtgacggagcaggactctgtctcacacacacacacgcatgcacgcacgcacgcacacacacaagatttggccttaaaaggaatgaagtactgatttatgctatgacaggcataaaccctgaagacatgctaactgaaagacagcagacacaaacatcatatattacatgattctatttataagaaatatccagaataggcaaaaccatacagatagaaagatttgtgattgccaagggctggaggatgggagaaacagagagtggctgctaatgggtataaagttccttcagagggtgagaagaatgttctgaagttacatagtggtgatggttgcaagtatttgtgaatacactaaaaaccagtgagttggacattttaaaagggtgaatgctatgctgtgtaaattatatctcaaatttaaaaaagaagaaaaaacagaacatcctatgtgaaatatcaaactatagcaaaatgaactttatcttgtcttgctgatgagagctgacaggttcagagctgacagtttatttaaaagatagctcacattttcctgttttagccaattaaaccaacaggataagaaaatgacaaacacatatttattcagtgaaacatatagaattctactataaaaaccaaatttctgccatacctgtgcttttttttcacaaagcgtatacacagtttccaaatttggatcattgtgaagtggatgagaatacattcgatgctcaaaagcttctactttctgaatgacttttttcagcccttgatcttgaatgcccatatcatcaatagggtctaataaggggatgccgtcaggaaaacgtttctgaacttcctg

SEQ ID NO: 1967 - DNA, 530 bp, Homo sapiens
ttctttttttttttttttttaatgagagcagactccctaaaaagaatcatttctacataaaaccttcagagatgcacccaaagtcaaaggcagactgacatgagaaaggggaatttcttaggtccgattagtgtacagaaaactcatagaacttaacttaaaggggatacaagtactgttgaaagaatacacttcttggctggatcataactaaactacaacctatattacttgcaaatacagattatttagtctcagttgccttgttaaacaatttgagggtagaagagctctctttggttaattaatgaaatagtccctagataggcccagagcaatggcaacctgtgcccagaatgctagcactttatcccaagactcagaactaaccacgatactgggtcaggcatggtggcgcatgtctgtaatcccagcactttgggaggccaatgcaggcgggttacttgagacgaggagtttgagaccagcctgggcaacacagtgagacccccatctctataaaaaaaaaa

SEQ ID NO: 1968 - DNA, 291 bp, Homo sapiens
ggccaggcgcggtggctcacgcctgtaatcccagcactttgggaggccgaggtgggcggatcacaaggtcaggagatcgagaccatcctggctaacacggtgaaaccccgtctctactaaaaatacaaaaaattagccaggcgtggtggtgggcgcctgtagtcccagctactagggaggctgaggcaagagaatggcgtgaacccgggaggtggagcttgcggtgagccgagattgcgccactgcactctggcttgagcgacagagcaagactccgtctcaaaaaaataa

SEQ ID NO: 1969 - DNA, 310 bp, Homo sapiens
ggccaggcgcggtggctcacgcctgtaatcccagcactttgggaggccgaggtgggcggatcacaaggtcaggagatcgagaccatcctggctaacacggtgaaaccccgtctctactaaaaatacaaaaaattagccaggcgtggtggtgggcgcctgtagtcccagctactagggaggctgaggcaagagaatggcgtgaacccgggaggtggagcttgcggtgagccgagattgcgccactgcactctggcttgagcgacagagcaagactccgtctcaaaaaaataaaaaaataaaaaataaaagg

SEQ ID NO: 1970 - DNA, 530 bp, Homo sapiens
gttttctttttcttttttttaatgagagcagactccctaaaaagaatcatttctacataaaaccttcagagatgcacccaaagtcaaaggcagactgacatgagaaaggggaatttcttaggtccgattagtgtacagaaaactcatagaacttaacttaaaggggatacaagtactgttgaaagaatacacttcttggctggatcataactaaactacaacctatattacttgcaaatacagattatttagtctcagttgccttgttaaacaatttgagggtagaagagctctctttggttaattaatgaaatagtccctagataggcccagagcaatggcaacctgtgcccagaatgctagcactttatcccaagactcagaactaaccacgatactgggtcaggcatggtggcgcatgtctgtaatcccagcactttgggaggccaatgcaggcgggttacttgagacgaggagtttgagaccagcctgggcaacatagtgagacccccatctctataaaaaaaaaa

SEQ ID NO: 1971 - DNA, 4672 bp, Homo sapiens
ggggcacggtggcgcacaagatcatgcagaagtacggcttccgggagggccagggtctggggaagcatgagcagggcctgagcactgccttgtcagtggagaagaccagcaagcgtggcggcaagatcatcgtgggcgacgccacagagaaaggtgtgtccccagggaagcgtgtgactagagggaaaggactggccccatccatatcagacatggccagtcttgatcctcatgtgtcagcagggggacaatgaggcgtgtggccagagggagagggctggccctgccatcactagaacacaggccgtcctgttcatatgatgcactgccacttccgttttgtgaaaccaggaatcctgaggctcatctttattttttcagaacagacgtagagagatgaaggcttgtggaggaaaagatggtgagagacttgggcagaaaatgagtagtcctcaggaagaaatcttggttatgtgtttagagcatgaaggacagagccatatagtgtggcagtgaatatacctgctatctccatctcagaggtcgtctctacttttcccttttgccctttcagtatagatgtgatttctgattctcttacagattgtttgctttgcgagatctgatgttatgttgcagtctcttggtaaatgatgcctagttggtgttttattttcatttaatttttacagtctgttctgtgttgagggaattcaggaaagagacaaacatatgttagcattttaatcagggaattaagtttgagtcagcctagctgaacttcctttgctaaagaaagaagaaaacttttctggcagccccgttcatgcacagcttaggatacatcacgagcctgacaggtgagtgccagaaaccaacagttgtcccgacttgtgaggttatctgaagtaaggcagccggtggctggattagtaactgcatattcccctgggcccgtgaccttgaacgtttgctccaagtcaactcacctataggaattatcactcacatgccctgtcagccctttgggaagtgagatgagcaaaaattgcaagtaatggtggaggctcaaaacatccagatgctattgtaaaaacatgccaaagcaaagcagaggcttttattgcagataaggctgtgttttcgctcagagaccaattgtgtagatgcctaggacataaatggtggggatcgctattgaaattaaattaattattgtaagtaggactcagttctgtaacacatctaatgatatgctgctcagttctgtaacacatctaatggtatgttttgatacagatgcatccaagaagtcagattcaaatccgctgactgaaatacttaagtgtcctactaaagtggtcttactaagggtaagaagctgaggaaagcaagctctctgcctgcctagatttgtgtgtgtcaccccagcctaccctgctccccctaaaagttaaaactgaaaatgatacttttgcaaataatactttgggcagatcccacgtaaggctgattttagatttttcactaatgtgtaagtctctttgctaagtacagtgtttaagactgcagtgagtaattaaatatttgaaattgctagagcttcagatagtttatacattttggtgcttgcatagatgcttttgtaactctttacaggcttaatatatgttttagtgttttaagaaatactaacttttgggtactttggggatgaaatttttcattatgtcgtttgggattgagaacatttaccatcactaagtcatatttatatacctctgctaggtgtttgtaagttatacttggtacttgaatttgtttatttttgtgtttaaagaacatggttggtgcgggagaggtggatgaagacttggaagttgaaaccaaggaagaatgtgaaaaatatggcaaagttggaaaatgtgtgatatttgaagtaagagtgttttcttttgatgtttataacacaagttgtaattggcacattacaaaacattttctacaaacaggacagggtatgctataagtaacattcttactgcagaaggtgacaggcgttggttatttgtacttctcttgctcaattattacagttttaaacataaagacaatgatttcaagttttatttgatgaagaaacaggaatgcttcatgattgaggatcagtatgatgactgaagaccttgattctagcgtgctcagtagtttagttccttagacatgcctttggtttcagtcatttggtgagtatttagtgcctctcacatgcactgcactgtgcggagagcacttggattacaggaagcatgctctgtactctcagtggtgtgttcagttgaagaaacacataaaataactgaaagatattcagttactagactaggtagtattgactaagttcaggagttgagaaaaggattagatcagtgaaaaaatagactgccttgtgagcaatagcagatatgggctgcgctttgaaacgaacaggtgggatttgcagggaagggtattctgattgggataatggctcgtaggagacagtgaagatcaggactaccaaaatggaatggatgggcctgttggggattagcagaagtgcttaggtgggtggaattacagagggctaggaaagctagacagagctagtcaaaatgagacctgatgtgaaaggccactagggcaccagcctttttaatctgaaagctctgcttcctctgtttctttatcctgttgctgtttgttgaccacataattatttgtttacgtcatcagctggcacagggcctttatgaggtcagagactgcctagccctgtgttcctggcacctaacaatgcctgtcataaaaacaggcattcagtacgtttttgatgatgaacaaattatacttatttccttggtatttgacaactacttgactgtatatgatgataattagaatatccactctgagaaatcatttaaaagagaaaactcattcaatgcaatctcaaatgcctttactcatcacgctctcattttcttccagattcctggtgcccctgatgatgaagcagtacggatatttttagaatttgagagagttgaatcagcaattaaaggttagtggtacagctaaatattaaagaataaaaaagttgaatttacagccttaatctttacaagtaaagttactgtttaattaaagttaaacctttatcttataggatacctgtattaactgtcttttgtttgcctttcagcggttgttgacttgaatgggaggtattttggtggacgggtggtaaaagcatgtttctacaatttggacaaattcagggtcttggatttggcagaacaagtttgattttaagaactagagcacgagtcatctccggtgatccttaaatgaactgcaggctgagaaaagaaggaaaaaggtcacagcctccatggctgttgcataccaagactcttggaaggacttctaagatatatgttgattgatcccttttttattttgtggttttttaatatagtataaaaatccttttaaaaaaacaacaatctgtgtgcctctctggttgtttctcttttttattattactcctgagttgatgacattttttgttagatttcatggtaattctcaagtgcttcaatgatgcagcatttcttgcactaaaaaaaaaaaaaaaaaaaaaactagaaagttttgggacatggggttatattaaattattctttgtttttctttttcttttaataaagcctgcaagttactaaattgtagtttcataaattctgtagtaaagtatcatcttggcagtgtgccaaaggtgaaaatgatgctttctctaacagagaaattcttagtgactccagtcgtagaaaaacgtctttacaacctgaataagattgaagaattgtgaacataccatggcctattggatgaatcatttgccgtaggctaaatcagactgtagggtttgtgatggatttatggagtatgtgggtatagaaatcatgaatctagcatttgttttcagagattcaagcatagtcttaagggtagatcagaaatgacaaatgaattcaaaacctagcaggtgcattgtaaatgtgtgcccagttatgttttggaaatggcagttccttggggtcatgtttctactggcaaaatttgcaatagtgttctattgtatgtaattttaaaatttataagattatccacgttggccaagtaaactgtactgccaatagaattctggaattgtgagaaattgtatcattgaagttcagtaggatgtgtggcttaaaaatttatcaggaccacaaaaaagaaaacaaaaatatttggtactgaggttcattgccagggcaggaggtatttccagaaaatactcatgcctgtgttctgttccttgctttcccaaatactgcatgtgactttcctaagcggcagctgaaagactcgagcccgtgctgtctcctttggttattatgacatgaaagtgtatcaagaactcagcatttctttgcatccatggacttggtttggagacataaggaatattctgaccctttttaaaaaaggattttctcatgtttttatttaacataaataaaagaataacattttatcttttgtggtattattttattgaataaaattgagttttatgataaaa

SEQ ID NO: 1972 - DNA, 552 bp, Homo sapiens
gggtccagtttcagctctaccattaacagctgtacaaataatttatttgttttctgagatggagtctcgctctgtcgcccaggctggagtgcagtggtgcgatctcgcctcactgcaacctctgcctcccaggttcaagcagttctcctgcctcagcctgccaagtagctgggactacaggtgcacaccatcatgcccagctaatttttacatttttagtagagatgaggtttcaccatgttggccaggctggtcttgaactcctgacctcaggtgatccacccgcctcggcttcccaaagtgctgggattataagtgtgatcaactgcacccagcctgtacaaataatttctaatatggcgtcttgcattacttctaagtccaccccttaagctagtcagctaatcttggcctccgtttatttctcatttgttaaataggtgatctctaagggttctttcatttgtatagtctgtcattggaaactctcctgtgctatttaggaaaatgggatcatcttcattgtacgaaacttcatacttactttttgat

SEQ ID NO: 1973 - DNA, 216 bp, Homo sapiens
cctttctccccagtcttttatttttaaaataactgtgttaatcagttagtgctttatttataatgaatttctgatagtcgaataatttctaaatctcctgcaagttagtacttgagaaatttgaaattaattttcaatattaacatttaagctaatataaaaattttaaatttcaataaaaattaaaaattatgtaagctacaatgtaactggcaa

SEQ ID NO: 1974 - DNA, 3512 bp, Homo sapiens
cgaattattggttgggggaaacccacgaggggacgcggccgaggagggtcgctgtccacccgggggcgtgggagtgaggtaccagattcagcccatttggccccgacgcctctgttctcggaatccgggtgctgcggattgaggtcccggttcctaacggtgggatcggtgtcctcgggatgagatttggcgtttcctcggggctttggtgggatcggtgtcctcaggatgagatttagggtttcctcggggctttcgggatcttcacctaatatccggtattattttatgagaggagtggtcttggctgtcagaactggatccctggggtgatatttgggaattagtggagtgatctctgaagacctagggctatgatctggagctgctgtggctgaaatttggggcctctgaagtggcatggagattgaggtccagagagcctgagatcttgagggctgacatttggagagatggggtcgagggttgtctttgggccttgactgctttgggcctttctcactctcattcccgggatgctttgccagaatctctgctggattggccgtaaccctgtccccgagcgggctcacagggtctgaaggccacgcatgaggcaaaggtaaagttctgagccacccggtgcctccttcccaggactgcaagatggaggaaggcgggaacctaggaggcctgattaagatggtccatctactggtcttgtcaggtgcctggggcatgcaaatgtgggtgaccttcgtctcaggtagggaccctcagcttggatgtcatgggtacctggggtggggatggaaataagaggggaaccgggaagtgccctaacacccctgtggtccccataccctgcaggcttcctgcttttccgaagccttccccgacataccttcggactagtgcagagcaaactcttccccttctacttccacatctccatgggctgtgccttcatcaacctctgcatcttggcttcacagcatgcttgggctcagctcacattctgggaggccagccaggtacgtgggtttgagtgccactgccctctggagacttgttcccaggacctcagtcagcgcctatggctacaccttttccagggggggaaaaaaaaaggctaggcatggtggctcacgcctgtaatcccaacactttgggaggccgaggtgggcggatcacgaggtcaggagttcaagaccagcctgaccaacatggtgaaaccccgtctctactaaaaatacaaaaaaattagccaggcgtggtggtgtgcacctgtaattccagctactcaggaggctgaggcaggagaattgcttgaaccgaggaggcagaggttgcagtgagccgagatcatgccattgcactccagccagggcgacaaagcaagactccatctcaaaaaaaaaaaaaaaaaggaaaggaaaggagaggagaggaaaggagaggggagggaagaggaagggaggggaggggagccccttcttcctggtagatacaaagctgggctctgaatacccttgagcagtgcacagcctgtacaacagtccccagcagccctgtctatcccccagcatctccgtgctagctgctgttccctctcctcccgctggctgggcctgctgccaagctgtggtgactcagctgagctggcacattgaccccagcttattgtttaaaaaccagcccgactgggaatttatggtttcctatccccttccacacatttttctggccacaaggcaagaaactatctctgcatctcagatttctctatttactctggccttcccttgcctgcattatgtttcatagacgtgggtaagtgagacctgacaggtgtttcaagaataatctcacagacaggaggggattatgggtaactagaacttcacagactgtttttttttccttttatttatttattttaatgaaacaggctcagaaggtattcaaatacttaaaacagatagagatggtgttatagcaatgtgagaatggcaaaaacatttttcctaattaaaaaaaataggctgggcgcagtggctcatgcctgtaatcccagcactttgggaggctgaggtgggtggatcacgaggtcaggagcgcgagaccatcctggctaacatggtgaaaccccgtctctactaaaaatacaaaaattagctgggtgtggtggtgtgcgcctgtaatcccagctatttgggaggctgaggcaggagaattgcttgaacccaggaggcggagattgcagtgggccaaggtcacgccattgcactccagcctgggcaacaagagtgaaactcagtctcaaaaaaaaaaaaaaaaaaaaagatgagggtctttgctgtgttgttcaggctggtcttgaactcctggcttcaagtgatgctcccacccccatctctgaaagcaccgggattacagattacaggcatgagccaccatgcctgccttcaaagactttttgttttgttttgtttgtttttgagacagggtcttgctctgtcgcccaggctgcagtgcagtggtgcaatcttggctcactgcaacctctccttcccggggggaagcaatcctcatgcctcagcctcctgagtagctgggattacagggggacagcccccacacctggctaatttttgtatttttagtagagacggggttttgcccatgttgcccaggctgtccttgaactcctggcctcaagtgatccactcacctcagcctcccaaagtgctgggactataggcatgagccactgcgcccagccactcaaagactttttattcaccctctgtgggtccaatgtcagcttcaggcgtctgggctgtggccactgaggaaagagatcctgctctggggacttccagtctgagtatcagaggagaagaggctcgggaggttttgcggggggatagaggaggtggggatggagcctttccttcagagctgcctgtttcagagtagaagagctggagttctgctttgggtccctcagtctgggttcaaggaaagagggggaggcaggttttttgatccagtgctgtccccacccccacccctgtgctgttgaggatgcagaaagaccctccctagggcccctctggcctcccaggcatggctcaccttctcctctgctctccctgccagctttacctgctgttcctgagccttacgctggccactgtcaacgcccgctggctggaaccccgcaccacagctgccatgtgggccctgcaaaccgtggagaaggagcgaggcctgggtggggaggtaccaggcagccaccagggtcccgatccctaccgccagctgcgagagaaggaccccaagtacagtgctctccgccagaatttcttccgctaccatgggctgtcctctctttgcaatctgggctgcgtcctgagcaatgggctctgtctcgctggccttgccctggaaataaggagcctctagcatgggccctgcatgctaataaatgcttcttcagaaatggc

SEQ ID NO: 1975 - DNA, 129 bp, Homo sapiens
ttttttttttttttttgagacagagtctcactccatcgtctaggctggagtgcagtggcgcgatctcggctcactgcaacctccacctcctgggttcaagcgattctcctgcctcagcctcccaagtag

SEQ ID NO: 1976 - DNA, 8701 bp, Homo sapiens
gtctctacacccctcccccccaacaatgaggggtaaactaggagggcagggggattcctaggcacaggaagcagcaagactaacagtcggggctagaggagggtctgggctagtttattttctctctggaggggtcttcagggagagcagtcccggctgctcaagctgtggagagagagggtgggtcagggcctggccaggtccaggggactccggggctgcaggtcagggaccgcatgcccagatcaggatctgggcctgttctgagggtctagactgtgggagtcaagggcaggtcaggagggaaatgggtggagggggggactggggaggatctgcaccgggtgggaaggagcggccgctcttgctgaaaggtggctgggagaggtcctggtcacagtcggagtcagagtcccaggaggggagtggagggctcaggcactggtgccccttgtggcctgcaggagggacaggttccctgaatgtgaccctcaagtaacccccaaatataggccctgtgtcccttcatagtatacctcattgatacttaaaccatgacccccaattcccttgaatgtgatccagtgtgacaccaaattatgacttcaatgacccttgcattttacccaattgacacttttttttttagagatggggtctcgctctgttgcccagactggagtgcagtggcacgattatggctcactgcagcctcaacctcgcaggctcaagcgatcctcctgtctcagcctcctgagtagctgagactacaggtgtgctcagccacaggtgcaccatcacccagctagtttttaaattttttggagagatggggtctcactgtgttgcccaggctggtctcaaactcctagactcaagtaatcctcccacctcagcctcccaaaatattaggattacaggcatgagccactgtgtggagtccccatggactcatataagatccaagtgactctgaatgtgaccatgaatgactcctggatgaaacctccagtgactccttaatgtgaccccagaacactacttaatgtgaccatagaataacacccatcagatgtgactcccaaataggctctctgaacatagcctccctgtgaagctagacaatgacctcccacccctgagcaattctcagcctccctcacctcttaggctcgaggccttgggacaggcccccgagcacaaagtgaggctgtctatggagttctgcagcacgtgcacagcagacctgcaagaagacaaggagctgggggcgctgggagactccacactgctcagggtgtagacagcagtacagctaaggttgggggccgtggtggggtgagtcctagggggtgagggaagtctggactcaggtgggctccaggttctggtggtcactgccagatcccgttgggggaacgggttcagaggagggtcaggggtcagactgcaggctgggcatcaccatatatcactcagttccttctggaggtcatccttccagcagccactggctccctgcggtatctcttcagtctccggacaggcggctgtctcatgaccctgctgcttcatcttggtcaggatctggggtggggagggatgagagaacagcagtcataataataatgacaatagtgccaggcgcggtggctcacacctgtaatcccagcactttgggaggccgaggcgggcagatcacgaggtcaggagattgagaccatcctggctaacacagtgaaaccgcatctctactaaaaatacaaaaagttagccgggcgtggtggcgggcgcctgttgtcccagctactcgagaggctgaggcaggagaattgcttgaacccaggaggcagaggttgcagtgagttgagatcgcgccattgcactccagcctgggcaacaagagggaaactccgtctcaaaaaagaaaacaaaataaataataataatgataatagtaaaaggtgactgttatatagcacttgttatatgccagactgcattcaagtgcacagtactcagctaatacagacacctgatcaggtagggaggagtgtttttttttgttttgttttttgtttttgtttttggtgtttgtttcttttttgagacagggtctcagtctgtcgcccaggctagagtgcaatggtactatcagggctcaacgcaccctgaacctccaaggctcaagtgatccccctacctcagccttctgagtagctaagtctacaggcatgtgccaccacaccctcttgttttttttgttttttgtagagacagggttttgccatgttgcctaggctggtcttgaacttctggcctcaagcaatccaaccacctcagcctcccaaagtgctgagataacaggcatgccacagcacccaacaggatgagttttctttttctttttcttttttcttttttttttttaagatgggagttttgctcttgtcgcccagggtggagtgcaatggcacgatttcggctcgctgtaacctctgcctcctaggttcaagccattctccatcctcagtctcctgagtagctgggattacaggtgcctgccaccacacccagctaatttttgtatttttagtatagacggggtttcatcatgttggccaggctggtctcgaacttctgatccacccacctcagcctcccaaagtgctgggattacaggcgtgagccaccgcgcccagccaagatgagttattattacatccattatacagatgaggaaactgaggctcagagaggtcaagtgacttgcccacagtcacacagcagtgagtggcagagctgagatttgaacccaggctccaatctcatggtggaggctggccaaaatccccatccctccctctcccactcctccccagggtccccatctcctccactcactttgcggcatttcacctgcgttttctgcattttctgaatgttcaccaagttctctgagatctcatcctcctgcgcttctgtggagggagggggctcaggcggacaaaggctgaagaaggaccccctccccacacaccggctgtgggctccaggaactcacggagcttctgatagatgaaggtcacctcctcccgcaccagttccagctcctcccacaggaacttcttgctgaggggacagtgcagcctagacctgcactccctgcctggcccctgacctcccatgcccctatctgtgcctccacccatccccgcaagctctgtcccctccccacacttccctgcccttttcccctccccttctacaatccccctaccctcatccccctcctctccttctgatccccagcctcccattctctcagtctctcccaccccactcagcctcctatcacctggcctccacctccccacctcctgtcccccgactttctatacccccagtctcctgtcctctcagtcttccctgccatccccctttctgatcccctggcctccttttccatcccacctccagctttctgtcttccctgccttctggcctctcagtttcccactcccccgcccccaccagccacctgtctcccctgagcctctcatcccctcctcatttttttttttttagacagagtctcgctctgccgcccaggcgcccaggcgcccaggctggagtgcagtggtgcgatctcagctcactgcaacctctgcctcctgggttccagtgattctcctgcttcagcttccctagtagctgggattacaggcacccgccgccatgcctgactaattcttgtatttttagtagagatggggtttcaccatgttggccaggctggtctcgaactcctgacctcaggtgatccgcccatctcggcttcccaaagtgctgggattacaggcatgagccaccacacccggcctcattccctcttcttgtccctcaggctttccaccatccctcagtccccctcccccaggcatctgccatttcccccatcctgcctccattccccagttctgggtctcccttccctcctgtggactccaagctgccctcccgccatccccgacctgtcccggatctcctgggccagcagctgcaggcagcgagtggtgcgggcccgctgcatctcctcactgtcacgcagggtcttctccagcccctgaaggccttgggtcagggccccatacagctcctgccggccctgctccatgccccacttgtgctcctccttctctccctggcggcctgtggggctcagcacctctgcagagagtgtgggaccttgactgagccctgatcccaccctgaacccagcttgtcctaatcttgacccagaacccagactctcccaatttccctcaccctggcctggcccagctgatcccaacaggaccagcttccagcctgactttttttcttttgagatgaagtcttgctttgttgcccaggctggagtgcagtggcgtgatctcggctcactgcaacctctgcctcccagaaagcaattctcctttctcagcctcctgagtggctgggactacaggtgcataccaccacgcctggctaatttttgtattgttagtagagatggggtttcaccatattggccaggctggtctcgaactcctgacctcaggtgatccacctgcctcagcctcccaaagtgctgggattacagccatgagtgacagcacctggcttttttttttttttttttttaagtagatatggggtttcaccatgttgtccaggctggtctcaaactcctgacctcaagtgatccaacctctttggcctccccaaatgctgggattacaggcgtgagccaccacgcctggcctagcctgaccttgatctctggtcagtcctcaccttcaagctgctgaatcttgatttgctgcaagcagctctccttctccaacatggtcactgagtggttcaggaactcgaaagcctgggggaaagaggtcagccttggggtgggaggaaggaggggagggcaaggagaaacagaggttgctgggggcagggccaaggtggttcaccttggtctgggcctgtaactggctcttgagtgactcaagttcacatcgcaggagcttctgggagtcgggaatcatcacaatggtcttggctgtgggcagagaagagggtgagccagggctgtaaggggtggggtctggggcaagggcagggcagaggtcagcaaaggctcagagtagcagtagggacaggggataagatatagaacaggggcccactcagccttgggcaggagtgaatgggtgaccatggcagggggacagctgatgctggggcagagggtagaggtagaaaccagcaggtcttccccacacagttttgttggaaaggagatttctcacctttgactttggaagagctggtctccaagggcttctaaggaagagagatgagatgggagtagaaatttgtccctgagctgcctccttgctcacctcaacccagttttgagggctggacaagagttggatctcctcagttctaggtgtcccaaaccgtaagtgcaggcaaagctgcactccaggcatattcatgcacctcccccttgggctacatatgctcagaagtgcacttatgtggctgagagacgatcacagccaaatccccatggaagacacacaaccacactctttccttccattcattccttcatccattcatttaagacttgcttagccagggcctgctgagtgccaggtgctgttctaggtgctgaagaaacacagtgggtgcattcatgggagtctctctgccttacagccccttccctaagccccacagcagtagattgcagtggttttctgcattgaaggggtttcccgggtgggggtgaccttagctacgttgtgatgcctcttcaaaatgtcctggtcattacagcactgcttctgcaggtctggactgggggagggggcagcctcatgtggcgaaggccctggaccccaccctggcctgcagtctgcagtcctcactgtgtccccagaagcagggcatcccaaggtctctggctctggagtcctggaccagtgagctgtacgctccagagccttgtccgaggaagagcctaggggtgagggcttccttgagggacagtgcagggcactcctcacattcccagcccctcccagtgtccccagccctatgggagccccctaactaaccccagtacttgtcacacttcatgttagcaggcaaacacatgctggagggtgagggaggtgagtagaggcaggacacagagtagtcagggtcccggggtaggccggccaaaagagggtcgctgtgagtagggaagcaggggctgctttgagataagtccccatgtccccagtgcccccagaccctccctgacatgccagagaggcctcagccctaaactcaaggcttctcagttatggtaggagccaaagctggataaaagatgatcccaaggccagacgcggccagcaatggtggctcacgcctgtaatcctagcactttgggaggccaaggcgggaggatcacttgaggtcaggagttcgagaccagcgtggccaatatggtgaaaccccgtctctactaaaaatacaaaaactagctgggcatggtggtgggcgcctgtaatcccagctactcgggaggctgaggcaggagaatcacttgaacccgggaggcggaggtggcagtgagccgagattgcaccactgcactccagcctcagcaacagagtgagactcagtctccaaaaataaaaaacaacaacaaaaaagattatcccagccccaaggtttgggctgggcagtgagaaggacccagaaggccccaaagaaaaaaaatcaggcctcagaagagtccaaagaaaaaagggaccttgacattggcttaaaggaaggcctttcctggcagggagcagcatgtgcaaaagcttggaggtgtggaatcacatgctctatgctggtaaattcatgatggctgaatcgaggtccgagaggaagcagcaggaggttagcagagcagctccagtaaggcattgacggccaagccaggagtttcgacctggccccacaggtgaatgccagccatagagtgtgagcaggagaggcagggcatatctgttcaataaatgttagctgaattggggcccagacccgtgctagaagaggctggaaacaggaaacagctgagctctgggtctcacattcaactcccctccccctccagtatagccacatatggcacagatggagatatctggggcaggtctgcctggagaaacttctaggtgaaaggcaccttgccctgagtcacactcagcctcttcccccaaatcctctagacctttctctctgtcacccttgccaggccctctgcctgattcagtcgacctggaagactcctacacgctcttcagaactactcaggctgggcacggtggctaacacctgtaatcctagcactttgggaggccaaggcaggtggatcacctgaggtcaggagttcgagaccagcctggccaacatggagaaaccccatctctactaaaaatacaaaattagccaggcgtggtggcgcatgcctgtaatcccagctacttggaagggtgaggcaggagagtcgcttgaacctcagaggcggaggttgcagtgagccgatatcatgccactgtgctccagcccgggcaacgagagcgaaactccgtctcaaacacaaacagacaaacaaaaactattcagcatatcttcagtaaaatcttccttaatccttttttaggctcctattttctgagcacctaattgagtgccgggcatcccctaagcattcactggatcttcacacccaccctgtgatgtacacgtttttcttctgcctgaaatgtcctaagctgcccctccgagagtcactgcctcagggaggtcctcacttccagggacagcagagtatgacggttaagcagggaaactctccagctagatggcctgggttcaaatcctagctctgtcccttccagctgtgtaatactggtcgcgttactgaacctctccatgcctcagtgtccccaactataaaaacgagatgtcataatagtcaccttactgggatgttgtgattagataaattaatccatgccagtgcctggtatagagtaatggggagctgtgtttgctctggaatgtcacgctgagaacccgggacttagggaccataggaagcctgggaggcttggaggggaaaaggagaggcatttgagaaccagcttaggtccccagtagtgcctcctctctccccgtcccatcccggttgctgcttccgtgtccctcccgggagaattatttagggagggggcggggtcatcatcctggctccgccccctgggttgtgaaatctacacccgccaggctccagaaccccacctaccacataccacctgttcatgctctcccatcagggaccacgaagccagtcctcagctgtgacgctgaagtttgatcccgcggggacaccatcgtattaaaacgctcagagactgagtcacagagaggggtgtggccggcattttagttccgcccctgccggagtagccgaaggcctcattggcgccttcacgcttcagctgcgcttagtagccgcggcgtaattggataaaagcccgtggagggggcgggatcccaggggggtttctacgattagtcaatacccaggagggcgggatag

SEQ ID NO: 1977 - DNA, 283 bp, Homo sapiens
ggcgcctccgaggcagtgtgtttccgcccagagctggagtctcccagctgccagccgaccccgaacccgcactcccgccaaccgcgctttttgtgggcggtcggaaaccacagcctccgttggatatgttcggtgcatgttataaacaaccacttaaaccctccggatctgagcctcccgcagaggaatgcagaatgacgccacggcacgcaggatgtgatgtcaccgagatgcagaggatactcagtcaaccaacatttactgagcatctacttcgtgccgt

SEQ ID NO: 1978 - DNA, 1912 bp, Homo sapiens
tacttttttggggatttatgataaatgataggtggtgattttattacaattacaacattgtaaattctgaaaacaaatgcagttgttagataattatacagccaagagaaatcttactcgttttttttatctgaatttttgtcctaaaaagcctacgatccaatggaattaagtgagcttatttcacaggcaaatatttcattgatacgtatatcattttgagcacaaagttggttcagtgtgttctaactgaatgtatacaattttcatattaatagcagagcgatcaacaatatttgccaactacccagtttaaaacggctattaaatgttaaaatgtcagtgttcacattagtcttcaataataaatttactgttgcttaaaagtcaactcagtcacattattttttagaattaaacaaaaaattcagctgacaaggcaaaaagaaatggtcaatattgactaagataaaattaccataaaaatcataatactatttttagtcacagtcatcaagatgagacattactattagcaattatctacttaaaacaagcaaaaaatcaaatctctactcaaacaaaaatcggctgttgagaagtcactttaactgttctacgtatcaaataccaacaaatttctactgtgtggctttcagaaatctaacattctaagtttactgaaagcagacaaaaaagaaacaacctggtggcaggcaaaatcacaaccagttgcagtcaagatgggatctgtatgtgagcaatgaagggaggagggcaatttatgcgttcaaaatttaaaatgccaaggtagggggaagagagagaaataaagatatatagctccataaacaaagggagaaaaccatgttgggtgggaggcaacctaaaatttctgacagtccagaatcagcaaatcgaaggcctgtctcaaacaaaacagcttctcacgacaaactttgaagtgggcaaggaggatacattcctttgcacccacaagaaccaaccccttgaccactggcacgctattactgagtcgatcatgatttaccgaacggcccggatgatgggcaaaaagaagagtctgctggagggggcctaggattccagaagcctggggaggcacaccctaggctcggggaaggagagaggtggagaggggctagcactcctcaccgtgattatctttctgcccgatattgtgcgtgcggatgagagaggagagtctcctcacatcccccttgaagacgcactcgtgcaccgggtagtgtgcggggcaactgcctccatccgcgacgacagcaacggggttggtgccggccagaagggccggggactgggagttggcagtcacggaggaattgtgcagcggcagagccggggcgccggggggattggaggaggccggagctgccttcagctgtagccggtggtgatggttactgaagatcttatgacaagctttgccgcccttgccaatcctgcttctggtaaaggtaccgccgagggcagccgccgcttcctcatccccgggctccagcaggtccccttcttctttgctgggcttgtggtccctccgcagtgagcggatcttctccccggtcatcgccgccgccaggggcaagggggggaatcgggaggctcaccgctggcgacggagctggcgctgcggcggcacaaggcgattagagcggtggccaagagcctccagcgcagcatgaactcccactgagcccccgagcctgggacaaacgcatctcccggggaagagccggctctcgcctaggcacgaagggacgcgcgctcgctgggggaagctagaactcaggtgcccacgacaccaggatctcagtctcgccgtcgcagccgccgtcgctgccttacaccgaaaaacagggcacggccatcttcc

SEQ ID NO: 1979 - DNA, 346 bp, Homo sapiens
gcaccagtactgattgcagggagcactgtagaagaggaatgaaggccaaacaattaaaagcggaggcggggaggtgggttgcacacaaaaaagggagggacgaattttagtgttgagttgtcaggaaagtcatagaagagtttaggtgctgactttggaaaatgatgggctgtccagcaatcggaaagaggggaggccactcaaatatttattagatgaatgaatttcgggcagatgtcagagttaacatatatgagggtggggacactcaaggagggcaaagaatcgtgtaactgaaatataattgtattagttcatggccaacctcaacctagtgtcaaactct

SEQ ID NO: 1980 - DNA, 1536 bp, Homo sapiens
tattaagtaacagcataccacctcagtcttcaacataccgctcagctcaagagtctgcaccccatcttttacaacctcaatttagtttgttgccttcagcacttgggggatcccagcagactcctcaagcctacagttcaactctctttactagttctactgcttccattgaaagagctcttcttcgagaatgtagtgttattaaacaccatcagcggccttcaggtacccagtcaattcaggcacaactgactggttcacagcactccttacatagttatctatcaaattcaagtgtagttaattttcaggaaacaaccaggcagtcatctttatcctgtagcccaattggagattccactcaggtgagcaacggaggattacaacagaagacctcccaggtctcagtggaacttgctcagtcttactcatctgcgattccatcatcagggtatcctccttctactacaaaaataaaaagctgttctacagaacaaccactgacatcaaccaagacccctaaacctcaaagtataattcctcctgtgcaaacactaagctattccaaacctttacataatcagagttctgtaatatcgggccaagcacaaatttattctacagcgcagctaccaagccttttatcagttagtcagtcccaaaattacggtttagtacagccacataatgtgccatctattgttcattcacaggtttataggtccagcaaggttgagaaattgccacccttgtataaaacattgactttttctgggtcatctcagactataactcctgaaaatcagacgcttaattattcatctaatcagcaagaggtattgtcttcagttacaaatgagaattaccctgctcaaacaagagatctgtcttcagtaagtcagtctcaaagttactcatctggtcactctcagggtttatcaccagttagccagacacaggttagctattcatctcaatcacaagttttgtcagttgttagtctttcagaaagctatgcttcaggggagtccctaacattaacagccccttctctttcttattcttctgcctctcgggctcagaatttgccagactctagcccgacccagaattatatttctatgcattcttcccaaaatgttcagactcaagagtcatcatctccccagtcccagaagtttttgcctgctgtccagtcatcatcttttgcatcctctactcattgtcagacattacaaaataacataacttcccctgacccaaagtcttatgctgaaagaaagcttgactcagatgtgtatccatcttcaaagcaagaagatggttttccaatgcaagagttacaggtgttgcagccacaagcatctcttgagtcatcaacccaaaggctatctgatggagaaattaatgctcaagaatcaacttataaggtgtcaaaggcagatgacagatattctcagagtgtaatcagaagtaattcccgtcttgaagatcaagttattggggttgctctgcaagcatcaaaaaaagaagaaa

SEQ ID NO: 1981 - DNA, 1536 bp, Homo sapiens; identical to SEQ ID NO: 1980

SEQ ID NO: 1982 - DNA, 185 bp, Homo sapiens
caagtaaaggcatctttacaagcacagcgtgttcaaagccctcaacaaatagtacatcccttccttcagatggaaggtcatgttattcaaagcaatggtgatcattctcagcagcaactccatcctcaaaattctgaagttatgaaaatggacctctctgagtcttcaaaaccattacaacaaca

SEQ ID NO: 1983 - DNA, 185 bp, Homo sapiens; identical to SEQ ID NO: 1982

SEQ ID NO: 1984 - DNA, 3536 bp, Homo sapiens
cagagtgaagacatttccacctggacacctgaccatgtgcctgccctgagcagcgaggcccaccaggcatctctgttgtgggcagcagggccaggtcctggtctgtggaccctcggcagttggcaggctccctctgcagtggggtctgggcctcggccccaccatgtcgagcctcggcggtggctcccaggatgccggcggcagtagcagcagcagcaccaatggcagcggtggcagtggcagcagtggcccaaaggcaggagcagcagacaagagtgcagtggtggctgccgccgcaccagcctcagtggcagatgacacaccaccccccgagcgtcggaacaagagcggtatcatcagtgagcccctcaacaagagcctgcgccgctcccgcccgctctcccactactcttcttttggcagcagtggtggtagtggcggtggcagcatgatgggcggagagtctgctgacaaggccactgcggctgcagccgctgcctccctgttggccaatgggcatgacctggcggcggccatggcggtggacaaaagcaaccctacctcaaagcacaaaagtggtgctgtggccagcctgctgagcaaggcagagcgggccacggagctggcagccgagggacagctgacgctgcagcagtttgcgcagtccacagagatgctgaagcgcgtggtgcaggagcatctcccgctgatgagcgaggcgggtgctggcctgcctgacatggaggctgtggcaggtgccgaagccctcaatggccagtccgacttcccctacctgggcgctttccccatcaacccaggcctcttcattatgaccccggcaggtgtgttcctggccgagagcgcgctgcacatggcgggcctggctgagtaccccatgcagggagagctggcctctgccatcagctccggcaagaagaagcggaaacgctgcggcatgtgcgcgccctgccggcggcgcatcaactgcgagcagtgcagcagttgtaggaatcgaaagactggccatcagatttgcaaattcagaaaatgtgaggaactcaaaaagaagccttccgctgctctggaggtaacggcgccttagagggaggtgtgtgggctcttgtgtctgtctggcagtccaaacccacccccatcccctgaccccacttttcctacctgggcaagtgtctgggggatgccccccccagtccttggggcctgggggtctggcttcaagacaccagtttactgccccaaaagtcagagccacattctgagaatcctatcaggccataatttgcaaggcaagcataaaactccaggcaaggacctagcattctcagccaggccctgggattctgattcctctcctgggttctgggtcaggtattgagatttccatacaggtcctaagtttctgatgctcagacatggcctaaagcatccagtccatgacctagaactctgggtctctcccctgccctgtttaagggattctgtttcacgggccctgtgcccttaagcccttcatttgcccctccagggccatctttcccccaaggccacccaaggatagagctgttccagtgctgggtgccctgctctgaggcctggaaggacccttggtctgggcacctagttgacagatttttggggctggggtaaggggaggtgaccatgagcccggagtggacaagaacctagccactgtaggattggcttggagaaggcaaggggttcccatgctgctatctctgcacccctgtggcagggcccgtccctgtgcccccagatgcagcaacctagctggagtgccaggcctgggtacaaaagcatcttttcagcctgcagtccctgcccttgtccccgcccctctatgagtgggcttgacgcaaatgtccagaatggttggaaaacaacagtggtatatcccagccatggcctcctggttaccctcccccaaccccagccccagccccagccccagccccagccccagccccagcccttccatttctgctctcctatgtacacacaaaggcacccactttagtccagtgtagacacacatgcacacacacatagacacggccgcttgagaaatagctcaaatacccacctcccacagctccataccacacagctcagcatagcacgaggcacacacccatatgcacacccgtcgcacgtgctcacacgctcatttacagaaacatgccacagccacctggcgctgttgcctttgggccaggggaagggacttcttctctggaaggagggttcctgggcacagtggctcaggaggcctcagagtcctcggggccttccagcagcccagcaggtcaagcgcctcctttggcctggctggggtggcaggagctccgaggggtggctgctcttcctccatgcctgtccctccgccatgaggccatccatgggggaacgtctttgctccaggcctacccggaccctgactgaactctctccttgtttttgtctcccgcccccgccagaaggtgatgcttccgacgggagccgccttccggtggtttcagtgacggcggcggaacccaaagctgccctctccgtgcaatgtcactgctcgtgtggtctccagcaagggattcgggcgaagacaaacggatgcacccgtctttagaaccaaaaatattctctcacagatttcattcctgtttttatatatatattttttgttgtcgttttaacatctccacgtccctagcataaaaagaaaaagaaaaaaatttaaactgctttttcggaagaacaacaacaaaaaagaggtaaagacgaatctataaagtaccgagacttcctgggcaaagaatggacaatcagtttccttcctgtgtcgatgtcgatgttgtctgtgcaggagatgcagtttttgtgtagagaatgtaaattttctgtaaccttttgaaatctagttactaataagcactactgtaatttagcacagtttaactccaccctcatttaaacttcctttgattctttccgaccatgaaatagtgcatagtttgcctggagaatccactcacgttcataaagagaatgttgatggcgccgtgtagaagccgctctgtatccatccacgcgtgcagagctgccagcagggagctcacagaaggggagggagcaccaggccagctgagctgcacccacagtcccgagactgggatcccccaccccaacagtgattttggaaaaaaaaatgaaagttctgttcgtttatccattgcgatctggggagccccatctcgatatttccaatcctggctacttttcttagagaaaataagtcctttttttctggccttgctaatggcaacagaagaaagggcttctttgcgtggtcccctgctggtgggggtgggtccccagggggccccctgcggcctgggcccccctgcccacggccagcttcctgctgatgaacatgctgtttgtattgttttaggaaaccaggctgttttgtgaataaaacgaatgcatgtttgtgtcacgaagca

SEQ ID NO: 1985 - DNA, 3530 bp, Homo sapiens
cagagtgaagacatttccacctggacacctgaccatgtgcctgccctgagcagcgaggcccaccaggcatctctgttgtgggcagcagggccaggtcctggtctgtggaccctcggcagttggcaggctccctctgcagtggggtctgggcctcggccccaccatgtcgagcctcggcggtggctcccaggatgccggcggcagtagcagcagcagcaccaatggcagcggtggcagtggcagcagtggcccaaaggcaggagcagcagacaagagtgcagtggtggctgccgccgcaccagcctcagtggcagatgacacaccaccccccgagcgtcggaacaagagcggtatcatcagtgagcccctcaacaagagcctgcgccgctcccgcccgctctcccactactcttcttttggcagcagtggtggtagtggcggtggcagcatgatgggcggagagtctgctgacaaggccactgcggctgcagccgctgcctccctgttggccaatgggcatgacctggcggcggccatggcagtggacaaaagcaaccctacctcaaagcacaaaagtggtgctgtggccagcctgctgagcaaggcagagcgggccacggagctggcagccgagggacagctgacgctgcagcagtttgcgcagtccacagagatgctgaagcgcgtggtgcaggagcatctcccgctgatgagcgaggcgggtgctggcctgcctgacatggaggctgtggcaggtgccgaagccctcaatggccagtccgacttcccctacctgggcgctttccccatcaacccaggcctcttcattatgaccccggcaggtgtgttcctggccgagagcgcgctgcacatggcgggcctggctgagtaccccatgcagggagagctggcctctgccatcagctccggcaagaagaagcggaaacgctgcggcatgtgcgcgccctgccggcggcgcatcaactgcgagcagtgcagcagttgtaggaatcgaaagactggccatcagatttgcaaattcagaaaatgtgaggaactcaaaaagaagccttccgctgctctggaggtaacggcgccttagagggaggtgtgtgggctcttgtgtctgtctggcagtccaaacccacccccatcccctgaccccacttttcctacctgggcaagtgtctgggggatgcccccccccagtccttggggcctgggggtctggcttcaagacaccagtttactgccccaaaagtcagagccacattctgagaatcctatcaggccataatttgcaaggcaagcataaaactccaggcaaggacctagcattctcagccaggccctgggattctgattcctctcctgggttctgggtcaggtattgagatttccatacaggtcctaagtttctgatgctcagacatggcctaaagcatccagtccatgacctagaactctgggtctctcccctgccctgtttaagggattctgtttcacgggccctgtgcccttaagcccttcatttgcccctccagggccatctttcccccaaggccacccaaggatagagctgttccagtgctgggtgccctgctctgaggcctggaaggacccttggtctgggcacctagttgacagatttttggggctggggtaaggggaggtgaccatgagcccggagtggacaagaacctagccactgtaggattggcttggagaaggcaaggggttcccatgctgctatctctgcacccctgtggcagggcccgtccctgtgcccccagatgcagcaacctagctggagtgccaggcctgggtacaaaagcatcttttcagcctgcagtccctgcccttgtccccgcccctctatgagtgggcttgacgcaaatgtccagaatggttggaaaacaacagtggtatatcccagccatggcctcctggttaccctcccccaaccccagccccagccccagccccagccccagccccagcccttccatttctgctctcctatgtacacacaaaggcacccactttagtccagtgtagacacacatgcacacacacatagacacggccgcttgagaaatagctcaaatacccacctcccacagctccataccacacagctcagcatagcacgaggcacacacccatatgcacacccgtcgcacgtgctcacacgctcatttacagaaacatgccacagccacctggcgctgttgcctttgggccaggggaagggacttcttctctggaaggagggttcctgggcacagtggctcaggaggcctcagagtcctcggggccttccagcagcccagcaggtcaagcgcctcctttggcctggctggggtggcaggagctccgaggggtggctgctcttcctccatgcctgtccctccgccatgaggccatccatgggggaacgtctttgctccaggcctacccggaccctgactgaactctctccttgtttttgtctcccgcccccgccagaaggtgatgcttccgacgggagccgccttccggtggtttcagtgacggcggcggaacccaaagctgccctctccgtgcaatgtcactgctcgtgtggtctccagcaagggattcgggcgaagacaaacggatgcacccgtctttagaaccaaaaatattctctcacagatttcattcctgtttttatatatatattttttgttgtcgttttaacatctccacgtccctagcataaaaagaaaaagaaaaaaatttaaactgctttttcggaagaacaacaacaaaaaagaggtaaagacgaatctataaagtaccgagacttcctgggcaaagaatggacaatcagtttccttcctgtgtcgatgtcgatgttgtctgtgcaggagatgcagtttttgtgtagagaatgtaaattttctgtaaccttttgaaatctagttactaataagcactactgtaatttagcacagtttaactccaccctcatttaaacttcctttgattctttccgaccatgaaatagtgcatagtttgcctggagaatccactcacgttcataaagagaatgttgatggcgccgtgtagaagccgctctgtatccatccacgcgtgcagagctgccagcagggagctcacagaaggggagggagcaccaggccagctgagctgcacccacagtcccgagactgggatcccccaccccaacagtgattttggaaaaaaaaatgaaagttctgttcgtttatccattgcgatctggggagccccatctcgatatttccaatcctggctacttttcttagagaaaataagtcctttttttctggccttgctaatggcaacagaagaaagggcttctttgcgtggtcccctgctggtgggggtgggtccccaggggccccctgcggcctgggcccccctgcccacggccagcttcctgctgatgaacatgctgtttgtattgttttaggaaaccaggctgttttgtgaataaaacgaatgcatgtttgtgtcacgaagca

SEQ ID NO: 1986 - DNA, 501 bp, Homo sapiens
tcacagaggccaacctgaaggaggaggcttagccatccactgggggagcgttcttctcacccagctgctttgagcctggctgagatggaggctagacttgaggaaggacttcctgacagtgttgggcactggcttcaggtgggtgagagctggagcgatttctgaggctgagtgggcagtgaggtgggggagatgggctatctctgccattgtcctgagaggagaaagcagccatgttgggtgggggtggcgctgacccccaaccccttcccaggtgtcacaagctcccttcgagcgccagggcctcagcagcctggcctggcacagcgggggcaggcaggggcggtgggaggcagctttcaacttcagctctgcctgggaaaaattccctttcatgtggctgcctgtgatctctccaggcggctctgccgaaggggggtgtccagcagggagtagggggaggtgttgcagctggggggcaccctcacccccagcacaagg

SEQ ID NO: 1987 - DNA, 1886 bp, Homo sapiens
ttgtaagaagacagagcacagttgtggagacaaatctcagcaatatatgttggctgcttgttttataagcttggttgtttttgttattagggaaaatttacacatttttaaaaatgtatttttagaatggaagagcaatctatttgctcctacttggaaaagattctttctaaaaatatggaactgatggaaaagaaacttatggattacattgatcagcgaatacatgaactccaggagcacattgatgataagattgctttgttactggatttgctgcaaaatcctaactccccgcccactgggatacctctaagacattatgactctggagaaagactttcaaatggagaaagataagctctcaacataaacagtgtactgcagatatttattacatatttattacaaagccaaaacccaaaaatatttataaaaagcaagtatttaatgtcctttgagggatcattgtcttacacaaagtgacctcagttttcgtttttactacacttgttattttaaatccagtactgtacactgagttaatatgatacagtcaaattatttttgctcacgatatttttcagtcttacagaaatgtatgtatatttgtgttaagagtttaaaatgcttgaggatttctaatacagttcattagtttgtattgtatatgtgtttaagtataatttttatttatacaaagatcttatagtcttagaagtatgaaaaataatgcttaagagtatttgatttttttctttttctaattatcttggaaaattggatacttaagacttggagcctttacttcagattaccagtttacattttgtattgcttgtgtgagataatgaataagatgtgatatttggcatgtgtaaacttagttcactctggggttgttaatattatttgtttcattacagagtagctgtaggtaggaaagtaaacatcagaactagcctagtccttgttacgattagtactttggatttgatttttcctgtaaaacagatgcagtcatcttgtttgacctcagtaaccccagacagtttaagaaaacctctccttttgagctgatacaggttttttccccagaatccttttctggcatgtttattgtatgaaataatgaggctctccatggaaggatgaacacatatgagtcaagggattgcaattctctctgatagacttagttttcagaccttataactattgtatatgcattgaagggtgatatatttgcatataaaaataaatgcacctgctctgggaactacttgtctttagttagtagaactgttttatttcaactaatctttacttcaaatgtcttattttttagaaaaagggtatctcatactcatttaatattttggcaaatttcttctttaaaaatgttacctgatgtaattcctgcgtgacatagctgaatttttaccctgccctaactctgcttatctttaagaaacaggatgcctgtgatgaaaagttccttttgtaaccagtccagaggagactggttacaaccacgatagctgaccaaacgactttaaaaagacctcagcctttttataatcttatttctgtgctaaataacgctcctgctagctccatgacagttgacaatcgccatgacagtgaccagaagaagccatgaaaggacaaaaaggaaggcagcactctggttttaggaagttcactgcccatttctgaaaaatccaggaatattcctccctttgcttgaatgtgaaacacctttattagaaaaattatattttaaccccctcactcctcattagttgaaaagttgatttgtgagccatactcctgcttctcaattcagtggcgattgaataaaacctgcagtgtttgtcactctt

SEQ ID NO: 1988 - DNA, 612 bp, Homo sapiens
agaaatgaaagctcaggtccacacagaaacttgtacacagttattaataaaagctttctttgtaatatcccagaagtcccaactaaaatgtcttagcaataggtgaatggttaaactatggtacctccatatcacgcagtgctgatgagcagtaaaaaacaacttggacatctctcaaaggcattttgctgagtgacaaaagagaatctcaaaaggtcacatactgtatgatctcactttataatattttcaaaataataaaactgtagagatgaacaacatattgatggttaccaggtattagggaaagaagactttaggggagtaggtatgacaatagaggggtagcagggaggagatcattgcagttaaagaatggttctgccttttgattatggtggtgtttaaataaatatgtgtacatatgataaaatggcatagaactatacacacacatcatattaatatcaatttcctggttttgatattggattataggtagataagatgtgaccattgggaggattggataaagggcactgagaaactaatatctttgcaacttcctgtgaatccataattatttcaaaatacagagtttcttaaaaactg

SEQ ID NO: 1989 - DNA, 1508 bp, Homo sapiens
agcaacactgtattcacgaccttgttggcttgcatttgcatgttttataccaaagcttatactgtactatgtgaagccatcagaagtcgcaagggaattgttaataacataaaacatttttatactaagatcatttgttttgtaattcgtttttaaagagtggcttggatgttttgaaaatactactgaatatgttaatattcttttaaatcttagattgaaaaatgatacattacttaaattgatagctcctaatatatttttaaaattacaactaaaagaagacttcttctgcagggaaaattggtcagcaaagtgaaattaaaaattttaaagtttttcccactctcgttggacagtaaatcagtgaaaggactgccccagttgagagtttgctctctttaagtatagaatgtttcctcttaaacaaattgccaatcatccagcctttactacttagccctctgacaaagtgccttactggctatttaatattacccagcttttatgggcaagtttacaaacattgttttttaaaaaattaaaacctgcaatgtttcgtgattaaaacaagtcttattgcatttgtttcactcttagctcactgattggaaaacatttgtcattttgctctgtttgatatcctcactattatggaatacattgtgcagctaaacaatttcccttgcgcctagtggacattcatgaatgtgtactacacgcaagaagaaacaaaccccgaaagaacacttgttggatttctttgtttttttttttactaaaagagaagttttaaaatgaaatgttttctatagtagatctttgaaaatacaataggtataatactgcatttctcagtgttttacaaagatcagaaagagaaacttctaggaattgcaaagggaaactttactcctcgaaagggtgctcacagatgtcatgtactgaatagctcccttttaaatgatcatttattttcatcaaagcctgttctatatatgccacttcattttctaacttttggtatgaaaaaatcagtttacttacagtatgttaattgtattgtactactataaacaggaacataatttccaattcagttttaaataattttaccagtactactaacttttaaggaaattaattcagttggttactcagtgtttgttacagaaagagtccagaaaagtattcaccctaagagaatgtcaatcatataatgataatttgtgaaagctttgagaatcaatcatcagtaagttactatcagtttataaaatattatcacatttgtttaaatgtgactttagatacttttatgccaaaaataaactcacatgagcacatgacagtctgagctctataatcagtgtgcttctgctgtgcagaaatgttagaaacgtattgtctaaatatctttgataattaaaatgtttaatatttaatgaaatttgttgttacttgttttaaatcttttttcttttaataaagatttaaataagaaataa

SEQ ID NO: 1990 - DNA, 1508 bp, Homo sapiens
agcaacactgtattcacgaccttgttggcttgcatttgcatgttttataccaaagcttatactgtactatgtgaagccatcagaagtcgcaagggaattgttaataacataaaacatttttatactaagatcatttgttttgtaattcgtttttaaagagtggcttggatgttttgaaaatactactgaatatgttaatattcttttaaatcttagattgaaaaatgatacattacttaaattgatagctcctaatatatttttaaaattacaactaaaagaagacttcttctgcagggaaaattggtcagcaaagtgaaattaaaaattttaaagtttttcccactctcgttggacagtaaatcagtgaaaggactgccccagttgagagtttgctctctttaagtatagaatgtttcctcttaaacaaattgccaatcatccagcctttactacttagccctctgacaaagtgccttactggctatttaatattacccagcttttatgggcaagtttacaaacattgttttttaaaaaattaaaacctgcaatgtttcgtgattaaaacaagtcttattgcatttgtttcactcttagctcactgattggaaaacatttgtcattttgctctgtttgatatcctcactattatggaatacattgtgcagctaaacaatttcccttgcgcctagtggacattcatgaatgtgtactacacgcaagaagaaacaaaccccgaaagaacacttgttggatttctttgtttttttttttactaaaagagaagttttaaaatgaaatgttttctatagtagatctttgaaaatacaataggtataatactgcatttctcagtgttttacaaagatcagaaagagaaacttctaggaattgcaaagggaaactttactcctcgaaagggtgctcacagatgtcatgtactgaatagctcccttttaaatgatcatttattttcatcaaagcctgttctatatatgccacttcattttctaacttttggtatgaaaaaatcagtttacttacagtatgttaattgtattgtactactataaacaggaacataatttgcaattcagttctaaataattttaccagtactactaacttttaaggaaattaattcagttggttactcagtgtttgttacagaaagagtccagaaaagtattcaccctaagagaatgtcaatcatataatgataatttgtgaaagctttgagaatcaatcatcagtaagttactatcagtttataaaatattatcacatttgtttaaatgtgactttagatacttttatgccaaaaataaactcacatgagcacatgacagtctgagctctataatcagtgtgcttctgctgtgcagaaatgttagaaacgtattgtctaaatatctttgataattaaaatgtttaatatttaatgaaatttgttgttacttgttttaaatcttttttcttttaataaagatttaaataagaaataa

SEQ ID NO: 1991 - DNA, 1510 bp, Homo sapiens
agcaacactgtattcacgaccttgttggcttgcatttgcatgttttataccaaagcttatactgtactatgtgaagccatcagaagtcgcaagggaattgttaataacataaaacatttttatactaagatcatttgttttgtaattcgtttttaaagagaaagacttggatgttttgaaaatactactgaatatgttaatattcttttaaatcttagattgaaaaatgatacattacttaaattgatagctcctaatatatttttaaaattacaactaaaagaagacttcttctgcagggaaaattggtcagcaaagtgaaattaaaaattttaaagtttttcccactctcgttggacagtaaatcagtgaaaggactgccccagttgagagtttgctctctttaagtatagaatgtttcctcttaaacaaattgccaatcatccagcctttactacttagccctctgacaaagtgccttactggctatttaatattacccagcttttatgggcaagtttacaaacattgttttttaaaaaattaaaacctgcaatgtttcgtgattaaaacaagtcttattgcatttgtttcactcttagctcactgattggaaaacatttgtcattttgctctgtttgatatcctcactattatggaatacattgtgcagctaaacaatttcccttgcgcctagtggacattcatgaatgtgtactacacgcaagaagaaacaaaccccgaaagaacacttgttggatttctttgtttttttttttactaaaagagaagttttaaaatgaaatgttttctatagtagatctttgaaaatacaataggtataatactgcatttctcagtgttttacaaagatcagaaagagaaacttctaggaattgcaaagggaaactttactcctcgaaagggtgctcacagatgtcatgtactgaatagctcccttttaaatgatcatttattttcatcaaagcctgttctatatatgccacttcattttctaacttttggtatgaaaaaatcagtttacttacagtatgttaattgtattgtactactataaacaggaacataatttccaattcagttttaaataattttaccagtactactaacttttaaggaaattaattcagttggttactcagtgtttgttacagaaagagtccagaaaagtattcaccctaagagaatgtcaatcatataatgataatttgtgaaagctttgagaatcaatcatcagtaagttactatcagtttataaaatattatcacatttgtttaaatgtgactttagatacttttatgccaaaaataaactcacatgagcacatgacagtctgagctctataatcagtgtgcttctgctgtgcagaaatgttagaaacgtattgtctaaatatctttgataattaaaatgtttaatatttaatgaaatttgttgttacttgttttaaatcttttttcttttaataaagatttaaataagaaataa

SEQ ID NO: 1992 - DNA, 1508 bp, Homo sapiens; identical to SEQ ID NO: 1989

SEQ ID NO: 1993 - DNA, 530 bp, Homo sapiens
aataaaataaaaatcaacacataaacaagttgccaatttatattatgagctaacatctagtcagaaaaatattctccatttactacttatttgtgtaattgaaatatgtagaataaaaatgagcattgtttttgagaagatatttagaagccattttcttacaaagcaattaaactaaaaactgtgaaaaaccagggcaatgttcctcaaaatttgcagttgatgtgtttgaaatctgaaatttcacaatttttatttttcaaggctatactatttaaattattgatggcaaaacagaatcaattttaagcaaatatagtaatttagaaagtaaattgaaaaaaagaaggtgaaagttattttctcaatcatgcaactgagagacacgcaatattggcagaatctgacctgttacacagaatgaaataatatcttgctgacataatcacaagggcttattgttttcgcataactatgtttacaataatgttgatgccaaactatgctgtttaaaaaacaacaacaaaaaa

SEQ ID NO: 1994 - DNA, 530 bp, Homo sapiens; identical to SEQ ID NO: 1993

SEQ ID NO: 1995 - DNA, 530 bp, Homo sapiens
aataaaataaaaatcaacacataagcaagtcgcccatttatattatgagctaacatctagtcagaaaaatattctccatttactacttatttgtgtaattgaaatatgtagaataaaaatgagcattgtttttgagaagatatttagaagccattttcttacaaagcaattaaactaaaaactgtgaaaaaccagggcaatgttcctcaaaatttgcagttgatgtgtttgaaatctgaaatttcacaatttttatttttcaaggctatactatttaaattattgatggcaaaacagaatcaattttaagcaaatatagtaatttagaaagtaaattgaaaaaaagaaggtgaaagttattttctcaatcatgcaactgagagacacgcaatattggcagaatctgacctgttacacagaatgaaataatatcttgctgacataatcacaagggcttattgttttcgcataactatgtttacaataatgttgatgccaaactatgctgtttaaaaaacaacaacaaaaaa

SEQ ID NO: 1996 - DNA, 530 bp, Homo sapiens; identical to SEQ ID NO: 1993

SEQ ID NO: 1997 - DNA, 656 bp, Homo sapiens
agacaatgttttgtgcacattaatttttgcacagactactttaaaagtttaatgcatgccattctattttccattatttatttacaaggagaaaccacacatatgttaaagtttgggagtgtattttaggaaatgattccttttctcatttttggctttagatattcttttttctttaaataagggtggaatataatgctgacaacatcaggcccttgtaatgcctcctctattcctctgcacagactgtgtccccacattggcttcctgcctgccagcctctgtgcctttccttgtgctgtccccagcctgggggctgggaatgtccttatccatttcttttgtgcctgttgaagttctgcttgtcccaccaggctcagatcagatacctcgaaggagccttttataatttcctcttcttcctcctcccctctcctccagttagaatggatttaccttccacttgtttccaaggcactttactcctggtgcgtgtatttcatcctcttgcttgtatacctctctctcctggttactgtaaactctgaagggcagcacttaaggaattctctctgccttaccttgtctagtatgatgctttttgttacagatacctggaaaatgggcgttgaattaaattatttactgaattgcaa

SEQ ID NO: 1998 - DNA, 1189 bp, Homo sapiens
gttgttcccatttttcatcagcacttccggatccgccccacacgatataatttgattcaactggtaactcccgttgccagatgaaatgtctctgatggacacttgccacgctttggtaatgcagaagctgtcgtgtttgcgaagtgtgctttgggggcatcactcgataaattaagcttttgaagagttgaagatatttgtgccggaaactgtggagaagcaacagcctgacagtgcctatttctcctcggctgttatttcaaaatgcaagacgtaaaccacatcccaagttatttttttagtgcttaggtcctctgggggaggggagaatgccccaggcaattgatttgagacaatatattgcacacatttataattttgaatttggtgaggagtggaatataaatttggaactcaaattaatcgttaatgtagtttctgtttataatgtgccaatacatttgaagatatttgtgttgccattgcctaccataatgtactgcttaaaatctctttttacctcatcaagaacaagacaatgttttgtgcacattaatttttgcacagactactttaaaagtttaatgcatgccattctattttccattatttatttacaaggagaaaccacacatatgttaaagtttgggagtgtattttaggaaatgattccttttctcatttttggctttagatattcttttttctttaaataagggtggaatataatgctgacaacatcaggcccttgtaatgcctcctctattcctctgcacagactgtgtccccacattggcttcctgcctgccagcctctgtgcctttccttgtgctgtccccagcctgggggctgggaatgtccttatccatttcttttgtgcctgttgaagttctgcttgtcccaccaggctcagatcagatacctcgaaggagccttttataatttcctcttcttcctcctcccctctcctccagttagaatggatttaccttccacttgtttccaaggcactttactcctggtgtgtgtatttcatcctcttgcttgtatacctctctctcctggttactgtaaactctgaagggcagcacttaaggaattctctctgccttaccttgtctagtatgatgctttctgttacagatacctggaaaatgggcgttgaattaaattatttactgaattgcaa

SEQ ID NO: 1999 - DNA, 656 bp, Homo sapiens; identical to SEQ ID NO: 1997

SEQ ID NO: 2000 - DNA, 1183 bp, Homo sapiens
gttgttcccatttttcatcagcacttccggatccgccccacacgatataatttgattcaactggtaactcccgttgccagatgaaatgtctctgatggacacttgccacgctttggtaatgcagaagctgtcgtgtttgcgaagtgtgctttgggggcatcactcgataaattaagcttttgaagagttgaagatatttgtgccggaaactgtggagaagcaacagcctgacagtgcctatttctcctcggctgttatttcaaaatgcaagacgtaaaccacatcccaagttatttttttagtgcttaggtcctctgggggaggggagaatgccccaggcaattgatttgagacaatatattgcacacatttataattttgaatttggtgaggagtggaatataaatttggaactcaaattaatcgttaatgtagtttctgtttataatgtgccaatacatttgaagatatttgtgttgccattgcctaccataatgtactgcttaaaatctctttttacctcatcaagaacaagacaatgttttgtgcacattaatttttgcacagactactttaaaagtttaatgcatgccattctattttccattatttatttacaaggagaaaccacacatatgttaaagtttgggagtgtattttaggaaatgattccttttctcatttttggctttagatattcttttttctttaaataagggtggaatataatgctgacaacatcaggcccttgtaatgcctcctctattcctctgcacagactgtgtccccacattggcttcctgcctgccagcctctgtgcctttccttgtgctgtccccagcctgggggctgggaatgtccttatccatttcttttgtgcctgttgaagttctgcttgtcccaccaggctcagatcagatacctcgaaggagccttttataatttcctcttcttcctcctcccctctcctccagttagaatggatttaccttccacttgtttccaaggcactttactcctggtgtgtgtatttcatcctcttgcttgtatacctctctctcctggttactgtaaactctgaagggcagcacttaaggaattctctctgccttaccttgtctagtatgatgctttctgttacagatacctggaaaatgggcgttgaattaaattatttactgaa

SEQ ID NO: 2001 - DNA, 7737 bp, Homo sapiens
agatattcctcgagccaaagtggtgagagtgtgtcaagcgcttatggactacaaagtatttgaagcagttccaaccaaagtctttggaaaagacaaaaaacctacatttgaagatagtagttgcagcctttatagattcaccacaatacctaaccaagacagtcagttaggcaaagagaacaaactatattcacctgccaggttggtatataatgttagattatcacgggaatattggcaggattttgtctacctttttatgagatgcctactggctttatattacatttttagcagtaaatgtggctaaaatatgggtctgtgggtaaatttgataaagtgcgatgaaattttgttagctttattgggtgtctcctagtcatattttatatttagcagaagcagtcaacacactttgattttcctgcttcaggttatagttgcagtgtaaaaagtgttctcataccacttggtatgagaacatagcgaaggcaggcagagagaaacccagattgcggtgggagagaagaaggaattatttaaagggaaactggggagacagaattgtggaatccagtgattgaaatggatgtgggtgataatgcataatgaacttacagctatttgtcatgaagtaaaccaactttaccctttcccctttgttaccctcagctaaactgtgcagtggtgacacagaggtataattgaagctcttatatcagatctgacctaaagtcagagttttagtgtattcattttcgtgtgtgtgtacttttttgaggcagggtcttaccctctcacccagactggagtgcagtggtgtgatctcagctcactgcattgtctgccttttgggctcaagcgatcatcctagcctcccagtagctgggactacaggcttgcaccaccatgcctggctaattttttttcttttcttttttttcctgtggagacggaatcccattatggttcaagaccaggctagtctgaaactcctgggctcaagtgatcctcccatcttgtcctcctaaagtgttggaattagaagcataagccactgcacctggcccatttttacatgttttgacccaaactaaaacatgataaaatttacctctttgtgtagaaaggaaatatgaggataaagtaacgcacagtcaaaactttcagatgcaggtccacacacttcatctgaaatccttgggaccggatgcatttaggaatttggaactttggagcatttagaaaagttatcttgtacatttatgtggttcaccatccctggaggcatctgggacagcatctggtaatcaagcataatgatatttccgtggtaaacaaaagaatatactaccgggataaattaaagctatcatagtctcgggacagattttgtcatgatatgagctctaaataaacctttgattttcaaagctttttgggtttcagaattgcaggtaaagggctgtagatctgtatttagaaaacgataagtactgttcaccaaagaatgccccacaaagagataactgataaacccagtaagcataatgaagtccagttatgtttgatcgcatttttaaactggtgactaagattttagtcattgaattagttaaatctaagaaaatgttcaaaggagaacagaatatgtttatgcttgagaaagaaggtgggtgtttttataatttattctactcttagaatttgaatttgttgtgtttttgctctgaaatgcataactctgtagaaaactcttagctctcaaatactaaaatatttctgtgggcttagtaaatgttcatttctgaaataaattcattttaggtatgcagatgcattatttaagtcatccgatatcagatcagccagtttagaggacctgtgggaaaatctgagtttaaagcctgccaactcccctcatgtaaatatctctgcaaccttgtctccacaaggtaagctaaggatgaagcaaagtaagaagtagaagacaaacttcaaagttatttaaaattttttaatcttaatctttattagattttaaatattcaaagtacagagaaagagtgcactatgtattaaagctgtttatgttcaattttaacagaagtctattatctttaacaaatagatcagtgttagaactcttgaacactgacttttgtccgatcagctggcaaaggttcagatctgagatgttttgcatgcagatttgtattgaaaatatgctctccgatgtttcttttcctaagattttattaggtcaagtaaaatttgaaaattacattaaaacattaacagaattcttcggttcttccttgtctgtagcaatggaatatagtttaatgactttaatttccaccctttcccccattccagatgtggaaaccctgagtggaataatctgcagccaatagtttcaaacaagtttttagcttgaatgaatcattctttcttccagagtccttattaacatgttacatgacttgatctcttatctctgacagattgctttttacagtacaaagaatgaaaagaattcctgttgtccaaagcctattctcctacactctaaacaaatcttggattgttttactttgttataagaaagcacttcgtaaggttgactttttctttctttttggccacaaatttactagcttagacctgcttagaaaaatattatggtgagcatgtagtaactattaattgttacttttcaccttgtcatttttcctgtgtagttattaatgaagtgtggcaagaagaaacaattgggcgtctactacaacttgtagaccttccacttcttgactccttactgaaacagcaagaggctgtacctaaaattcctcaacctaagaggcagtccaccatggtcaacagcagtaactatctggatcgagggattctcaaggcttatagtgactctcagtatgtggaaatacatataataatttgagtgtgtttgtaggtagattgagataatggttttaaggtaatctgttctattcttttttctataggatcagatatgcattgttagttgatattatcagtatttgagaatgtgaagaacaaaattacattagtcaaaattagaaaaagatttgtttcatttttcatattcatttttgtttcacatataacttgcacattaagtgaaaaaaaatgattatgctttagcttcttatctttgttaaaatgtagagctgtctggactctcaagatttcctcaaagggacctggaagaatagaaacagatttgacagattattgagatcctttgattacatatctagaatgcctgttacatatgtatttagttaactagttgtattaaagaaatacaataaggccgggtgcggtggcccatgcctgtaatcctagcactttgggaggccgaggtgggtggatcacttgaggtcaggagttcgaggccagcctggccgacatggtaaaaccccgactctactaaaaatacaaaaattagccaggcatggtggcacgtaatcccagctacttgggaggctgaggcaggaaaatcacttgaacttgggaggcagaggttgcagtgagctgagatcatgttgctgcattccagcctaggtgacagagtgagaatgtctcaaaaaaaaaaaaaaaaaaaaaatgaaagtaactctctcattccagttactcctctcttgaatataaatcctaaggtttgaaggcttaactttaggtgctgagggaattaaaatttttttttccttaaagacgagttctgcattactcataactttgaggctcttctataaaaattattgtcagttaaaataagttatcagatttttctagcttaattttttattattttgccttagcagatagtgttccagtctaattaaggagatgaaaatgtttgaaaggaatacaattacattttcagtacttcactaattctacgttccaaagaactattaatactataaacagttgaatgccaaaaggcagcttaaagccttatatgaaaaagttaatcccaacatatgtgttactgaattctgcagatataacacatttctataacctaaaggaacatgtgaaacattgtgtaattactaaattttttttttttgagacagagtctctctgtcgcccaggctggagtgcagtggcatgatctcagctccctgcaacctccgcctcccgggttcaagcgattcttctgcctcagcctcccaagtagctggaactacaggcgcacgccaccatgcctggctgatttttgtatttttagtagagatggggtttcaccatattggccagggtggtcttgaactcccgaccttgtgatctgtccaccttggcctcccaaagtgctgggattacaggcatgagccactgcacccagccttgtaattagtaatttttatatacaaaatcagaatttgcgctagaagtgaccttaaagatcatcttatcatataaagttgaagctgatgtcaagagaggtgaaatgacctgcctgagatacctcacctggctgaattagttgtcctgagtccatggcagtatggcagtagaggacatgattgattgctttttaacgatagatagatagatagatagatagatagatagatataaaaaatggaatattaaaagtttactactttatttcttgaaatgtaacatttttctgaagttacccagcaggattttactgtagatgataattgatatttaattattttgttggtttgttttttgagatgaggtctcgctctgttgcccaggctggagtgcagtggctcaatctcggctcactgcagcctctgcctcctgggttcaagcaattctcccacctcagcctcccaagtatcttggattacaggggcgcaccaccacacccagctaatgtttgcatttttagtagagacgggatttcaccctgttggccaggctggtctcgaactcctgacctcatgtgatccacctgcctcggcctcccaaagtgctgggattacaggtgtgagccaccgcgccgggcctgatgtgtaattattttgaaatgtttcttcctttaatctgtcctagctaaagggagagctaatagatcatagacagaggtctgaagtaagcaacattgtgttggagaaatactggcccagaactcagatctgagatctagtcctgcctgaggcctgagcaagtaacttggagtttctgggtctccatcgtaaatgtgaagagcaagagtagagtttgaatttgtatgctcttttcacctctgtattgtggtggagagtttgttttcgtgaaaaaggaaaaaataaagggaaaacattaagctgaatttgtaaatgtgatacgtgatctagctatatattaaaaagaactacacatatcttttaagctcatgtagaaatttatcctgatggcttgaaatagctactgaattaggtaccatgtgtatatttgttattctttgccttttaaataatcttcccttgccttttaaataatcttcccctctcccctatagggaagatgagtggctctcggcagcaattgactgtttagaataccttccagaccaaatggtggtggaaataagcagaagctttcctgagcaaccagaccgaacagacttagtgaaagaacttctgtttgatgccattggcagatattacagtagtagggaacctctgttaaatcacttatctgatgttcataatggaattgcagaactcttaggtaagtaagatctaactggatactagcatttatcttttggaggaaacaagaaaaagttagttctcaaactgaaccagaatagtactactacaagctgggagtggatctggattaattcatggaaagtatgtttgttcaaaaacttctaggggtcatttggaaagaggctttaacaagctctgaagttatgcagaaacttctggttacccaggagtataatgctgctctcattcaccggaagcttaagcataaagcagcaattctctttttttagaagagttatcagcaccaccattactcccctttcaatctcttcaaaatggcagactctctgctttgtctctctaccaatgagccacataatttgttggaaacaaattggaggtttcagaaaatttatttttctcaaggagagttggatacatgagtattgtacacatggtatactcccaaatgtactgaattaatgaaaaacagaatgggattttatccacaaagctaagagttagatttaatgccagaagatattatatgacagggacttaggctgttagttgccaatttgagaacaagctgcctttatggtattcaccatttattgttaattcctagtcttgcttttgcttttggaaataattttgaataagtgcactttttaactcaaactgtaacttgagttttgttccctttaatatagtcatatttggtcaattaaaagcagtttttttcttttggctaaagtgaatgggaagacggaaatagctttagaagctacccagctccttctaaagcttttagatttccaaaatagagaagaatttagaagactactgtatttcatggctgttgcagcaaatccttctgagtttaaattacagaaagaagtaagtcttttgtttaactgttagttgtatttaatatccttaatacttacaggttaagtattagattattccatcttcagcatcaagtatgctgaaatgtataatagctattaatatttaatattcccttttatattaaacttgtctcttaaatatatactattggatatatttgttttatttttatagagtgacaaccgaatggttgtgaaaaggatattctcaaaagctattgttgacaataaaaatttatccaaaggcaaaacagatcttctggtactctttttaatggatcatcagaaagatgtttttaaggtaaaattgtgaaagtagttaaattgagcttatgtaatagatcactagattaaaatgcatttgaataatgtcccatgtcccttctttttcttaagattcctggaactctacataaaattgtaagtgttaagcttatggccatacagaacggaagagatccaaatagagatgcaggtaatctgagaaatattattttcatgatcttccaaagacaaatttcagatgttttttgaaaatgttttgctataagtagttgaactttaatttcaaccaaatttaaaacattctcctcagagttattcatacaaagcaactttacaagtgttagaaagtcagcagtgcttaccatcttcagtgcatattacaaaatggggaagaaaaacataaagacaagaatattgcttgatttttctggttaaatatgaggaattgagtcattaactgaactttttacgtttaaactttaaggatatatttattgccagagaattgatcaacgtgactattccaacaatacagagaagacaaccaaagatgagctgttgaatttactaaaaactcttgatgaggattcaaaactttctgccaaagagaagaaaaaattgctaggtcaattctataagtgtcacccagacatctttattgagcattttggagactgagtttttaatatctgtatataagttgtgtattttaagaataaattatgtatcctaaatatccaatcacatttgtaagtgtggaagctctaaatttgaaactgtacttaataaaaatttttttgtataacttcgtg

SEQ ID NO: 2002 - DNA, 101 bp, Homo sapiens
ctgtaatcccagcactttgggaggctgaggcaggcggatcacgaggtcaggagatcgagaccatcctggctaacacggtgaaaccccctctttacaaaaaa

SEQ ID NO: 2003 - DNA, 463 bp, Homo sapiens
atgaatttcaaatgacccacttataatttatggctctagtgcactaagaggagtttttgtttatttatttatttattagacggagtcttgctttgtcgtccaggctggagtgcagtggcactatcttggcttactgcaacctccacctcccaggttcaagcaattctctgcctcagcctcctgagtaactgggattgcaggtgcctgctaccacgcccggccaatttttgtatttttagtagagagggtttcaccaccttcggcaggctgtaaaggagttttaataatgtccttcaggagcttatcttatgctttcttcatcttaaacattctattttgcctaaaaaagtaggaagataatttcaagtagcaatttctttaattataattcccttttttccttaccattgtactcatgcatatggttttcctttctagacgatcttaaaggaagtaataactt
